United States Patent Application Publication US 2012/0017338 A1 - sequence listing, part 18

SEQ ID NO: 78516 - protein, 222 aa, Zea mays
  Coding DNA Sequence Number=SeqID_36737
MRRYIVSSFHEPGGIIPFVSANIGSVEKDHIHGDLTLPSVSVLLSISYNGANQGSKYETNLQPGTATEDMMAFEEQNADKSHLEAYQFKRITYTATHVQQGTRKRKGDGWERNSEPGTNQWAQVDMAAIAAAGSEVGGCRCHGSSKLPRLAAWPVAPDELLYIYVHEVPKRKKRIKMNRARTDLIFCCFLHQHNFPYFSPRSMFLGMRMSVSKCWIPELMNG

SEQ ID NO: 78517 - protein, 189 aa, Zea mays
  Coding DNA Sequence Number=SeqID_36738
  Homolog annotation: Hit_ID=Q69JG4; Match level="QueryCoverage=24%, HitCoverage=8%, E-value=2e-17, Identity=95%"; Hit description =Putative nodulin-like protein
MNNLGQMGVAMGYVDVSLFVSMTSIWGFFGRIASGTISEHFIKKRAPRENTTKGWFPKEVPTSSQAAPNITPPSDDVPAFSEIVLTIPPPGEDVLASSQIVQPMSPTREFGQLSAKLGNVISYWVHFSAKLEGTSIRRRPSRLREKGVPLEYPQFIRSHRPSGETRRFGTAMADEVRKMEGFCVNQCYK

SEQ ID NO: 78518 - protein, 373 aa, Zea mays
  Coding DNA Sequence Number=SeqID_36739
  Homolog annotation: Hit_ID=Q69JG4; Match level="QueryCoverage=99%, HitCoverage=69%, E-value=1e-127, Identity=65%"; Hit description =Putative nodulin-like protein
  Pfam annotation: Domain name=Nodulin-like; Domain location=8-234; Score=341.4; E_value=1.5e-99; Accession=PF06813.4; Description =Nodulin-like
MAGMRWGRWLGLVMAVWVQCISGNNYTFSNYSHALKTLMGLTQLQLNGLSVAKDVGKAFGLLAGLAYDRVPTWLLLTVGSLEGLLGYDAQWMVVSGAVAPLPYWQICVFLCLDGNSTTWMNTAVLVTCIRNFRRSRGPVSGLLKGYVGLSTAIFTDTCSALFTDDPTSFLVMLAVVPAAVCALTMVFLREGAAAVDDEDDGLCFAAINLLAVAIALYLLAADLTRLGTGAGSSLSPCSWCSSRPPLPCRRSWRGDRGDPTVSANADLEEADSLVAAAVPLLLMVKEARAPEERLWLGEEHTIAQTLTSLDFWLMFASFLMGVGTGLAVMNNLGQMDVAMGYIDVSLFVSMTSIWGFFGRIASGTISEHFIKCI

SEQ ID NO: 78519 - protein, 164 aa, Zea mays
  Coding DNA Sequence Number=SeqID_36740
MVVAPWVKYLSQEYDPMLTWAARTYRSPSCPSFREAESHDRGALGTKKDNQTALARDTAQHEYEGPGEAGTASGRRTEQRMTSRWPRASRRAACRRQRTEATTSRGPAGVSRGRVRRAGLGQGSRGGRRRGERSTALKGRTGNDVEVSGGVELKVVGNWRSVLP

SEQ ID NO: 78520 - protein, 162 aa, Zea mays
  Coding DNA Sequence Number=SeqID_36741
MVVAPWVKYLSQEYDPMLTWAASTYRSPSCPSFREAESHGRGALGTKDNQTALARDTAQHEYEGPGEAGTASGRRTEQGMTSRRPRASRRAACRRQRTEATTSRGPAGVSRGRVRRAGLGQGSRGGRRRGERSTALKGRTGNDVEVSGGVELHCGELHNDDG

SEQ ID NO: 78521 - protein, 167 aa, Zea mays
  Coding DNA Sequence Number=SeqID_36742
MVVAPWVKYLSQEYDPMLTWAASTYRSPSCPSFREAESHDRGALGTKDNQTALARDTAQHEYEGPGEAGTASGRRTEQGMTSRRPRASRRAACRRQRTEATTSRGPAGVSRGRVRRAGLGQGSRGGRRRGERSTALKGRTGNDVEVSGGVELHCGELHNDDGRPTEE

SEQ ID NO: 78522 - protein, 74 aa, Zea mays
  Coding DNA Sequence Number=SeqID_36743
MGKPIPSLLMLLLCRVTALVPTITGMGDHVSGRTSQSPWIRVHRPSSFRFEKWIQSNPDLARVLEKSLDFYRDP

SEQ ID NO: 78523 - protein, 56 aa, Zea mays
  Coding DNA Sequence Number=SeqID_36744
MGKPGPSLLMLLLCRDHASPWIRVHRPSSFRYEKWIQSIPDLARVPEKSLDFYQDP

SEQ ID NO: 78524 - protein, 117 aa, Zea mays
  Coding DNA Sequence Number=SeqID_36745
MQYNGSSSLISCEKQMIQIEFYPCKIRAHRLGVQCLTDPDCRRAVTALVPTITGMGDHVSGRVRGKVYGQVHSGIRTLILIPLSSHRPRIPMDPCPQTIIILIYKNGYIQFLTSREC

SEQ ID NO: 78525 - protein, 94 aa, Zea mays
  Coding DNA Sequence Number=SeqID_36746
  Subcellular localization annotation: CTP_CleavageSite=77; ConfidenceScore=5.14e-01
MQGSCLTAIAAKSTKDLPTLTTPLLPLPLSAIANYPSDSGVNKSGLRAKSQNVQGLTQKIHQTQGLFSKWARRRGICASEPSDPSPAAMIRSYR

SEQ ID NO: 78526 - protein, 45 aa, Zea mays
  Coding DNA Sequence Number=SeqID_36747
MKPKSKSAQQGGGYDEPAEALFPEIVEQKLLATIYGGRKATSWFK

SEQ ID NO: 78527 - protein, 212 aa, Zea mays
  Coding DNA Sequence Number=SeqID_36748
  Subcellular localization annotation: CTP_CleavageSite=64; ConfidenceScore=5.04e-01
MQGSWLTAIAAKSTRDLPTLTTPLLPLPLSAIANYPSDSGVNKVVATTNLLKALFPEIVEQKLLATIYGGARRRVGSGEQFRPQQQTTAQDSAAPRFPAIFDAWFPPSVGSTGWPMRLFHTNKLPASILPSVTPLRMMEGRREVTAEELGRCRELAEEDWPSGPGREPSAVGCSPWEGHLGERARVRGHGAQAFIYTEERRSMALGLRIARW

SEQ ID NO: 78528 - protein, 242 aa, Zea mays
  Coding DNA Sequence Number=SeqID_36749
  Subcellular localization annotation: CTP_CleavageSite=74; ConfidenceScore=5.68e-01
MAVDALLSSMGRRSSSTPHHGALLPGARSLQASSRRTFSSSLVSTAKQQGALLLLFHGRRPSLPWRDAVLLQPSASISHPTSSLSAIPMAVRPCTAIPFPGSSTQSSFSGSELEQWPTVAHGRPPWRPRPSPFFSPARYPLRSSSRVFVCPRHAVSRVPLLPPASRQQAPAMAGSTPSMDAQKFQQRAPFLAVRRGARRLFDKMCSKPRAAAALPFDLHSPRRVSSLSCSLRSPIRDAVETR

SEQ ID NO: 78529 - protein, 76 aa, Zea mays
  Coding DNA Sequence Number=SeqID_36750
  Subcellular localization annotation: CTP_CleavageSite=38; ConfidenceScore=5.49e-01
MAGSTPSMDAQKFQQRAPFLAVRRGARRLFDKMCSKPRAAAALPFDLHSPRRVSSLSCSLRSPIRDAVETRGKKKN

SEQ ID NO: 78530 - protein, 99 aa, Zea mays
  Coding DNA Sequence Number=SeqID_36751
  Subcellular localization annotation: CTP_CleavageSite=38; ConfidenceScore=5.52e-01
MAGSTPSMDAQKFQQRAPFLAVRRGARRLFDKMCSKPRAAAALPFDLHSPRRVSSLSCSLRSPIRDAVETRGEKHPVALAIIIFLRSELFELLREYNHS

SEQ ID NO: 78531 - protein, 425 aa, Zea mays
  Coding DNA Sequence Number=SeqID_36752
  Gene Ontology: Mol. function=xylose isomerase activity; Biological process=carbohydrate metabolic process
  Homolog annotation: Hit_ID=Q40082; Match level="QueryCoverage=52%, HitCoverage=49%, E-value=2e-96, Identity=83%"; Hit description =Xylose isomerase
  Pfam annotation: Domain name=AP_endonuc_2; Domain location=23-237; Score=33.9; E_value=5.7e-07; Accession=PF01261.14; Description=AP endonuclease family 2
  Pfam annotation: Domain name=Nodulin-like; Domain location=343-423; Score=-74.3; E_value=1.6e-06; Accession=PF06813.4; Description =Nodulin-like
  Pfam module annotation: Pfam domain module=AP_endonuc_2::Nodulin -like; Domain location=23-237::343-423
MTWPWEDGTNSLAVAKRRMRAHFEFMEKLGVNKWCFHDRDIAPDGKTLEETNSNLDEIVQLAKQLQGETNIKPLWGTAQLFMHPRYVHGAATSPEVKVYAYAAAQVKKALEVTHYLGGENYVFWGGREGYQTLLNTDMKRELDHLANFLQAVVDYKKKIGFNGTLLIEPKPQEPTKHQYDWDVATTFAFLQKYGLTAAIMNWRLHGLMGCLEISMQTLVILKLARKGDFETLEKKVLEWGEPAVASGKQVALLSLSHARSGGALFSPDAASRRHLRSRGPEEITDSASRQLQPRDDSGGGRATTRQRCKKPHSDPVHFVEDHEAKDDGPHRGGDADVQLQANRWLVFVAAMWLQSMAGIGYLFGAISPVMKAALGYNQRQVAALGVAKDLGDCVGFLAGSLSAVLPSWAMLLIGSAQNFLGYSWL

SEQ ID NO: 78532 - protein, 252 aa, Zea mays
  Coding DNA Sequence Number=SeqID_36753
  Homolog annotation: Hit_ID=Q6YZD9; Match level="QueryCoverage=33%, HitCoverage=14%, E-value=6e-33, Identity=77%"; Hit description =Nodulin-related protein-like
  Pfam annotation: Domain name=Nodulin-like; Domain location=170-250; Score=-74.3; E_value=1.6e-06; Accession=PF06813.4; Description =Nodulin-like
CHHELETARINGLLGNIDANTGDPQVGWDTDQFMTDIAEATLVMSSVVKNARKGDFETLEKKVLEWGEPAVASGKQVALLSLSHARSGGALFSPDAASRRHLRSRGPEEITDSASRQLQPRDDSGGGRATTRQRCKKPHSDPVHFVEDHEAKDDGPHRGGDADVQLQANRWLVFVAAMWLQSMAGIGYLFGAISPVMKAALGYNQRQVAALGVAKDLGDCVGFLAGSLSAVLPSWAMLLIGSAQNFLGYSWL

SEQ ID NO: 78533 - protein, 161 aa, Zea mays
  Coding DNA Sequence Number=SeqID_36754
  Gene Ontology: Mol. function=diacylglycerol kinase activity; Biological process=protein kinase C activation
MLLIGSAQNFLGYCWLWLIVTRQAPALPLWMNDQVLDKGMVVMGAPQGQQNGFKEAANSVEFLVAVPWYLKQVATPMLVEPLLKKLDIMVVEISNLYQVATLVNDLCRSKSVNDLSSPSCQTHKDDDNNNLEDEDEWQDGKKFDAVATFKILSEVDIAHLS

SEQ ID NO: 78534 - protein, 192 aa, Zea mays
  Coding DNA Sequence Number=SeqID_36755
  Homolog annotation: Hit_ID=Q6YTQ6; Match level="QueryCoverage=49%, HitCoverage=6%, E-value=3e-31, Identity=66%"; Hit description =Helicase-like protein
MRLHTLRDDVVLYPQRYEDREPTHCIPVHTLSDICRICLPLKTMKVPFVLERRQYPIKICYAMTINKSQGQTLSQVGIYLKKPVFTHGQLYVVVSRVTSKEGLKILIEDDDGRSNKETKNIVYKEIFIALPLMVNAKDDHMRDSLSSVPSASYSLTNLMNHSRNEEGTRISRRTCTDQQLFWPRTESSTGNR

SEQ ID NO: 78535 - protein, 70 aa, Zea mays
  Coding DNA Sequence Number=SeqID_36756
MSGSVHCFVVTYGPTVPVQLSIVRCPRRGTMRLHTLRDDVVLYSQRYEDRGPTHCIPVHTLSDICRIFGF

SEQ ID NO: 78536 - protein, 100 aa, Zea mays
  Coding DNA Sequence Number=SeqID_36757
MKYYLRFVLYLKEVKYIDKCSMSYELHYSFASEVGSWPMVRPYRYNLASYVARGGVRCGFIPLEVLLTQGRVIQPIVVVRGNEDGIGYIGTIEFYIYKYF

SEQ ID NO: 78537 - protein, 58 aa, Zea mays
  Coding DNA Sequence Number=SeqID_36758
MAVLQGIPALELPITVAGFLKLVELCKGLVVLPCLASSVEVKNRYRRMKRMEDAVKSS

SEQ ID NO: 78538 - protein, 64 aa, Zea mays
  Coding DNA Sequence Number=SeqID_36759
MAVMRGIPALELPITVAGFLKLEELCKGLVLLPSLASSVESHTHPQVKNRYRRMRRLEDAVMCS

SEQ ID NO: 78539 - protein, 61 aa, Zea mays
  Coding DNA Sequence Number=SeqID_36760
MAVRRGIPALEIPITVAGFLKLVELCKGLVVLPCLASSVEVKNRYHKMRRMEDVVTCSCEV

SEQ ID NO: 78540 - protein, 284 aa, Zea mays
  Coding DNA Sequence Number=SeqID_36761
MTPTLVIGKIVAFEMSRKMGQEEEPISSRPYAFECDEHKTMKDKKKDPSLSSLSEEEEEGDDDGDDDDDDDDDDEASTSSSEDEETVRRVGKLVTPISTKLQRPDGRDSGQGLVHSRDTISPCPSPASGKDSRPRRIHVSPEGPLKQQAHLRLARGPARAGFAKKQPWPDCLASRPDRRSIQCKDRLTHYPDARSSVDRAEVTAVTSPLHWLTVGTCSRSQGGPTRVNNDVNRVTRKMAIALLIWPLTSTVRGPATAAKASSEGWRLCLRPNICPPRDQFDKVT

SEQ ID NO: 78541 - protein, 258 aa, Zea mays
  Coding DNA Sequence Number=SeqID_36762
MTPTLVIGKIVAFEMSRKMGQEEEPISSRPYAFECDEHKTMKDKKKDPSLSSLSEEEEEGDDDGDDDDDDDDDDEASTSSSEDEETVRRVGKLVTPISTKLQRPDGRDSGQGLVHSRDTISPCPSPASGKDSRPRRIHVSPEGPLKQQAHLRLARGPARAGFAKKQPWPDCLASRPDRRSIQCKDRLTHYPDARSSVDRAEVTAVTSPLHWLTVGTCSRSQGGPTRVPERPAPCAKDACALSYLGYPQNIPIKQGYRL

SEQ ID NO: 78542 - protein, 201 aa, Zea mays
  Coding DNA Sequence Number=SeqID_36763
MVALMVERWWWVWCLVEAQRFAWRGMPSAGGAQANSARQWKGEEGHGTAFGERGTGEQRLRFGCVMGGGAERGDSIWAFGANQNSVRFTVSPKKPNWTPRVSVGAKAKTPPFARGLRCSRWSDGDKTGKDTLRLIRHQAKACDVVIPPCGLVQLRGPRVIRPIVTGPAWPPRVTGLICKGIPVITVCNPALWEYSGDNLGG

SEQ ID NO: 78543 - protein, 350 aa, Zea mays
  Coding DNA Sequence Number=SeqID_36764
  Gene Ontology: Mol. function=cysteine-type peptidase activity; Biological process=proteolysis
  Homolog annotation: Hit_ID=Q109R5; Match level="QueryCoverage=75%, HitCoverage=28%, E-value=9e-34, Identity=31%"; Hit description=Ulp1 protease family, C-terminal catalytic domain containing protein
MDIVVEEGNTDVGNTVEPSYEVVARSGCSAQLSTNDTNEHELDIESEDSKVSVGNAAKQSHDVVGVGIDCIFNHVKVSTEADLGTQPDVIHLTSLDVPNESSQISSEQNKQDALDTLIRISQHKKPKKLNVARVVSEDYKCTPEDVQLIEYIKTLPGKQVVVDIDSAWLNRNDMECLFHGDIQVSGEALSAYIHCIRDEEHLLHREGGKVFLENTFISSLLKRDGDPKMLLNCKEDTIEKRVDDYLQSDMVFIPMNIENFHWYLAVLNAKKNELKGIERQIKLAAEHKELYQGKWSNLDVASWPVIEKITTQMQTDGVSCGLWMINYMEYWTGSSLSDNVTQDDITIFPF

SEQ ID NO: 78544 - protein, 127 aa, Zea mays
  Coding DNA Sequence Number=SeqID_36765
  Gene Ontology: Mol. function=cysteine-type peptidase activity; Biological process=proteolysis
  Homolog annotation: Hit_ID=Q109R5; Match level="QueryCoverage=88%, HitCoverage=11%, E-value=4e-15, Identity=38%"; Hit description=Ulp1 protease family, C-terminal catalytic domain containing protein
MGIDNAKYLKKHWIQSTKPYPISLSLQKLKDILDVNKPMDTDCFNMAVRMIACNDALFLLEDKYHYMDLQFCSITKFGRDPRLRAKPDINMLAKLLECWPDMEYDVSDCKQILLPFSFMGHFTFICT

SEQ ID NO: 78545 - protein, 666 aa, Zea mays
  Coding DNA Sequence Number=SeqID_36766
  Gene Ontology: Mol. function=cysteine-type peptidase activity; Biological process=proteolysis
  Homolog annotation: Hit_ID=Q109R5; Match level="QueryCoverage=76%, HitCoverage=53%, E-value=3e-69, Identity=30%"; Hit description=Ulp1 protease family, C-terminal catalytic domain containing protein
  Pfam annotation: Domain name=Peptidase_C48; Domain location=167-360; Score=-24.1; E_value=0.035; Accession=PF02902.9; Description=Ulp1 protease family, C-terminal catalytic domain
MDIVVEEGNTDVGNTVEPSYEVVARSGCSAQLSTNDTNEHELDIESEDSKVSVGNAAKQSHDVVGVGIDCIFNHVKVSTEADLGTQPDVIHLTSLDVPNESSQISSEQNKQDALDTLIRISQHKKPKKLNVARVVSEDYKCTPEDVQLIEYIKTLPGKQVVVDIDSAWLNRNDMECLFHGDIQVSGEALSAYIHCIRDEEHLLHREGGKVFLENTFISSLLKRDGDPKMLLNCKEDTIEKRVDDYLQSDMVFIPMNIENFHWYLAVLNAKKNELKGIERQIKLAAEHKELYQGKWSNLDVASWPVIEKITTQMQTDGVSCGLWMINYMEYWTGSSLSDNVTQDDTTMFRFKLPAILWDSRLNTKKGHQNLDHNVDEDGESSSDVQIIDTPLTSTNTQELMFVLCTYIMGIDNAKYLKKHWIQSTKPYPISLSLQKLKDILDVNKPMDTDCFNMAVRMIACNDALFLLEDKYHYMDLQFCSITKFGRDPRLRAKPDINMLAKLLECWPDMEYDVSDCKQILLPFSFMGHFTLYVLNMDTRSIYIMDSMPIPSWFKGDHPSMHYIHNIHYIANNMNAAMELANPTWKDNIYMWRRIVPTWVPRTLNWDLSGFLVINFMHDWNGIRLPCICTNGNDLRTKFLVELLKYKDNESKDNIPEEIQEIIRHIR

SEQ ID NO: 78546 - protein, 71 aa, Zea mays
  Coding DNA Sequence Number=SeqID_36767
MEYDVSDCKQGFIWLSCINFMHDWNGIRLPCICTNGNDLRTKFLIELLKYKDNESKDNIPEEIQEIIRHIR

SEQ ID NO: 78547 - protein, 259 aa, Zea mays
  Coding DNA Sequence Number=SeqID_36768
  Gene Ontology: Mol. function=cysteine-type peptidase activity; Biological process=proteolysis
  Homolog annotation: Hit_ID=Q109R5; Match level="QueryCoverage=71%, HitCoverage=19%, E-value=2e-23, Identity=31%"; Hit description=Ulp1 protease family, C-terminal catalytic domain containing protein
MGIDNAKYLKKHWIQSTKPYPISLSLQKLKDILDVNKPMDTDCFNMAVRMIACNDVLFLLEDKYHYMDLQFCSITKFGRDPRLRAKPDINMLAKLLECWLDMEYDVSDCKQILLPFSFMGHFTLYVLNMDTRSIYIMDSMPIPSWFKGDHPSMHYIHNIHYIANNMNAAMELANPTWKDDIYMWRRIVPTWVPRTLNWDLSGFLVINFMHNWNGIRLPCICTNGNDLRTKFLVELLKYKDNESKDNIPEEIQEIIRHIR

SEQ ID NO: 78548 - protein, 116 aa, Zea mays
  Coding DNA Sequence Number=SeqID_36769
MKGEGRISNPVANGRDAGGHGWKLASCGPDAAARGWRLASSGDARDRGGKLRGRPGRCVPDGWRLASGGVLEIRVFGKWPGRCVPDGCAGSDNIRRRENGRLRSQNGKNGRLPLPS

SEQ ID NO: 78549 - protein, 461 aa, Zea mays
  Coding DNA Sequence Number=SeqID_36770
  Gene Ontology: Mol. function=oxidoreductase activity
  Homolog annotation: Hit_ID=Q2A977; Match level="QueryCoverage=64%, HitCoverage=94%, E-value=1e-67, Identity=46%"; Hit description=RNA recognition motif (RRM)-containing protein
  Pfam annotation: Domain name=RRM_1; Domain location=111-178; Score =25.9; E_value=0.00014; Accession=PF00076.12; Description=RNA recognition motif. (a.k.a. RRM, RBD, or
MKGEGRISNPVANGRDAGGHGWKLASCGPDAAARGWRLASSGDARDRGGKLRGRPGRCVPDGWRLASGGVLEIRVFGKWPGRCVPDGCAGSDNIRRRENGRLRSQNGTGTVKVHNVSLKASEQDISEFFSFFGEIVHVELKSCDERSQFAYITFRDNQGAERDMLLTGATIEDMAVIITPAIDYKLPAFVLADLEKAEDIAVSMLAKGFVLGMDAVEKAKAFVEKHQLTSTATAKVASLDRTMGLSQKFSTRTLVVNEKMKEMDEKYQVAEKTKSALAATEQTVSTASSVIMSNRYILTGAAWVTDAYNKVATTTTDASKSIKERMMAEQEGANQSGETAKVDLLEISEANEQEWKRHEDDSTKNVVQESPEMTSEKDPSCHESEVSKANVHDSVLMTEQSEREHNQPEGEFANTHVPGSPVTIPVTVSTIDGNSSNGPKKPDSAEALQLNFSPFSVAFEQ

SEQ ID NO: 78550 - protein, 357 aa, Zea mays
  Coding DNA Sequence Number=SeqID_36771
  Gene Ontology: Mol. function=oxidoreductase activity
  Homolog annotation: Hit_ID=Q2A977; Match level="QueryCoverage=83%, HitCoverage=94%, E-value=1e-67, Identity=46%"; Hit description=RNA recognition motif (RRM)-containing protein
  Pfam annotation: Domain name=RRM_1; Domain location=7-74; Score=25.9; E_value=0.00014; Accession=PF00076.12; Description=RNA recognition motif. (a.k.a. RRM, RBD, or
MAGTGTVKVHNVSLKASEQDISEFFSFFGEIVHVELKSCDERSQFAYITFRDNQGAERDMLLTGATIEDMAVIITPAIDYKLPAFVLADLEKAEDIAVSMLAKGFVLGMDAVEKAKAFVEKHQLTSTATAKVASLDRTMGLSQKFSTRTLVVNEKMKEMDEKYQVAEKTKSALAATEQTVSTASSVIMSNRYILTGAAWVTDAYNKVATTTTDASKSIKERMMAEQEGANQSGETAKVDLLEISEANEQEWKRHEDDSTKNVVQESPEMTSEKDPSCHESEVSKANVHDSVLMTEQSEREHNQPEGEFANTHVPGSPVTIPVTVSTIDGNSSNGPKKPDSAEALQLNFSPFSVAFEQ

SEQ ID NO: 78551 - protein, 340 aa, Zea mays
  Coding DNA Sequence Number=SeqID_36772
  Homolog annotation: Hit_ID=Q5SNH3; Match level="QueryCoverage=27%, HitCoverage=27%, E-value=6e-36, Identity=74%"; Hit description =Putative pollen specific protein SF21
  Pfam annotation: Domain name=Ndr; Domain location=219-339; Score= -96.6; E_value=0.0032; Accession=PF03096.5; Description=Ndr family
  Subcellular localization annotation: CTP_CleavageSite=83; ConfidenceScore=5.55e-01
MEGIDAKVTVSRPRPHQPRARPPPISLSGALPSSTPPNAAKSPTNAALPSPAARPRQIHAPRAPLAARATAGILATNHRHQFRAPRVKSSRHNDAARGRGRKAARVAAGKDARHHRKARSGCARGRGRKVARVAAGKAAKHHHKARSGCARGRGRKAATFAPPPTLPPSPPPSKLAPDLPPTKPEGEIRGRAPFHTRRQHSLRPLPCLNRLLLEGWTEEHLVRTRCGSMTVAVYGDGDKPTLIMYPDVALNYMSCFQGFFFCSEVASLLLHNFCVYHTNPQGHEMGAAPMSSDVPVPCVADLADQVADLYDDLQARLEADTVGMASSSVIGMIVLLRFTG

SEQ ID NO: 78552 - protein, 179 aa, Zea mays
  Coding DNA Sequence Number=SeqID_36773
  Homolog annotation: Hit_ID=Q5SNH3; Match level="QueryCoverage=42%, HitCoverage=18%, E-value=6e-20, Identity=63%"; Hit description =Putative pollen specific protein SF21
MSCFQGFFFCSEVASLLLHNFCVYHTNPQGHEVSDAGSIPVIRVLQMGAAPMSSDVPVPCVADLADQVADVLHFFRLVQLQLDLCFFPFVRGILFPMVFMQQTYVGNSTDLDDEPDGENPCGVKKDLEAMVFHPEQAGSRFKYDALQPARPSVAATTTPRCGPAVPAVRPSVMLLAATS

SEQ ID NO: 78553 - protein, 141 aa, Zea mays
  Coding DNA Sequence Number=SeqID_36774
LHVKGHVVVAIYQIDDASEIRSANRKRCDEALAEPVTTMFWVALEDERMIFLLRSSDHGALPVPLPHYFAKSRQKVTTHMSAASNEGLALPQGGNKTMPYLEPACSGWNTIASKSFFTPQGFSPSGHHQDQCYYPHKFAKA

SEQ ID NO: 78554 - protein, 113 aa, Zea mays
  Coding DNA Sequence Number=SeqID_36775
  Homolog annotation: Hit_ID=Q336U8; Match level="QueryCoverage=81%, HitCoverage=7%, E-value=3e-24, Identity=59%"; Hit description=TPR Domain containing protein, expressed
  Pfam annotation: Domain name=TPR_1; Domain location=26-59; Score =23.8; E_value=0.00063; Accession=PF00515.18; Description =Tetratricopeptide repeat
  Pfam annotation: Domain name=TPR_2; Domain location=26-59; Score =24.5; E_value=0.00039; Accession=PF07719.7; Description =Tetratricopeptide repeat
  Pfam module annotation: Pfam domain module=TPR_1::TPR_2; Domain location=26-59::26-59
MGKRREAPRGSVRAFSRGSQAEPQRWRPFRFLGHHYARGGDNQRAVKCYHRAVTLNPDDSEAGDMAQDTLCGLLDVEGKESLELAVCKEAAGKSPRALCTPWNIILNRYSADL

SEQ ID NO: 78555 - protein, 140 aa, Zea mays
  Coding DNA Sequence Number=SeqID_36776
  Gene Ontology: Mol. function=zinc ion binding; Biological process =protein transport
  Homolog annotation: Hit_ID=P93231; Match level="QueryCoverage=82%, HitCoverage=12%, E-value=5e-34, Identity=59%"; Hit description =Vacuolar protein sorting-associated protein 41 homolog
MEESNLAANTKLHSTVIVNLMIVDNKRTVHLRTQHRDIILPYEVVEQLLHTSKKCDKRYLLHLYLHALFEIDIHAGKDFHDMQVELYADYETRMLLPFLLTSQHYRLDKAYEIFAQKELVREQVLSLVEWAMLRKLYRQL

SEQ ID NO: 78556 - protein, 514 aa, Zea mays
  Coding DNA Sequence Number=SeqID_36777
  Homolog annotation: Hit_ID=P93231; Match level="QueryCoverage=30%, HitCoverage=16%, E-value=5e-51, Identity=60%"; Hit description =Vacuolar protein sorting-associated protein 41 homolog
  Pfam annotation: Domain name=DUF315; Domain location=106-427; Score= -145.5; E_value=1.6e-07; Accession=PF03759.4; Description=Domain of unknown function (DUF315)
  Pfam annotation: Domain name=PHD; Domain location=444-487; Score =49.7; E_value=9.5e-12; Accession=PF00628.19; Description=PHD-finger
  Pfam annotation: Domain name=TPR_1; Domain location=27-60; Score =21.1; E_value=0.0039; Accession=PF00515.18; Description =Tetratricopeptide repeat
  Pfam annotation: Domain name=TPR_2; Domain location=27-60; Score =20.9; E_value=0.0046; Accession=PF07719.7; Description =Tetratricopeptide repeat
  Pfam module annotation: Pfam domain module=DUF315::PHD::TPR_1::TPR_2; Domain location=106-427::444-487::27-60::27-60
MGKRRGSSARKRQSIFLAAAKLNPNDGVPFRFLGHHYARGGDNQRAVKCYHRAVTLNPDDSEAGDMAQDTLCGLLDVEGKESLELAVCKEAAGKSPRAFWAFFGDLAIYRGSDWICYVNESYDFILYRSLAELYVINGQYEKTLSLYAELLKPEVFEFIEKYNLYDAIHDKIVNLMIVDNKRTVHLRTQHRDIILPYEVVEQLLHTSKKCDKRYLLHLYLHALFEIDIHAGKDFHDMQVELYADYETRMLLPFLLTSQHYRLDKAYEIFAQKELVREQVLSLVEWAMLRKRDCANQILKAAMAINSNTLVEMEVPEPYLDSLPKNGRSTLGDIIYRYITSDQFSPECLLDCLDLSMEYQALEVANRVEASVYVWRRRVAAKPVNGLGRSSSARSSWGMDGRSLSLCLVELMRRDDVGAAAANRNRNGSVMRVKEKCSEEEGDSVCSVCIDGGELLLCDKCPSAFHHACVGLQATPEGDWCCPLCRCGVCGGSDLDDDTAEGFTDKTIIYCEQCE

SEQ ID NO: 78557 - protein, 251 aa, Zea mays
  Coding DNA Sequence Number=SeqID_36778
MKAKKGNLWRQLAEERRDANKAIADAQAAQADAKLARAEASLARQRAEELEARLGGLRSRVDKAETLTCVEMAHDEEVEDLGDLDNTLPEASLPEASGVDLVPPSDVGKGPSSTPAPTGDGEDPAPAPALTGEDASKAVVELAAEDPAAVAGPSQVLTFGPAHATATDNTIFVAASTVVPADDDSCGFVSKCFESDDSRSLISWTEESSDEGLDYFAALDVAAAEPSPLVEGSDGLLGASAGYRRRRVVAK

SEQ ID NO: 78558 - protein, 119 aa, Zea mays
  Coding DNA Sequence Number=SeqID_36779
MAATGAKGASQDSWSDFCVSNAIPSAATAKDMMAHDEEVEDLGDLDNTLPEASLPEASGVDLVPPSDVGKGPSSTPAPTGDGEDPAPAPALTGEDASKAVVELAAEDPAAVAGPSQVAE

SEQ ID NO: 78559 - protein, 167 aa, Zea mays
  Coding DNA Sequence Number=SeqID_36780
MEKDRQDAAQKRRAVVRIGDPFREAKKARGREVCRTGPRKSSAGAKAATSSAGKPPLGEPTKGRRLSRIDKAATRVADFDTDICVGDYLVGSDVGQLAVVPTPVVATSPMAATGAKGASQDSWSDFCVSNAIPSAATAKDMAADFADHVASGALTAEFAAEVERLRA

SEQ ID NO: 78560 - protein, 157 aa, Zea mays
  Coding DNA Sequence Number=SeqID_36781
MALLDPCECFQPEVALNLARNLLGWGVLMFAGRTCAGVSPLSDLATEEFVFFVSKLPSGLALPIPSFFVQLLEGLGLQPLPVASYFILQAAIIAYLRGMRTEARTSSHALRWSPSLASHRCKGGRRRWRAVGTEVAAFAGKLLEVEVVAVAGEAARN

SEQ ID NO: 78561 - protein, 65 aa, Zea mays
  Coding DNA Sequence Number=SeqID_36782
MALLDPCERFQPKVALNLLLEGLGLQPLPAASCFILQAAIIAYLRGMSVEAMLLPASSSSIRGEG

SEQ ID NO: 78562 - protein, 277 aa, Zea mays
  Coding DNA Sequence Number=SeqID_36783
MSEPGLLVLVETKRRIYRGRWHSPHAADWSAAFGGAVMALLDPPERFQPEVALKLARNSLGWGVLAFAGRIHVGVSPHGDLAAGEFVFFVFKLPSGRPSSPTSVGCPWRRRSFPLLPPAFGGKDDHQPREGGQRAEPWVHPSCPQQFGVGSEPCCGSISLALMASVPPPTPPSTAKRGVAAHPPHGRQSGRAQVHRTHSGPCTAGHRRPRCFDAARGSYKTPYAMEVAATCLDGSRYGTRLSDYMAPDHPRRQAFGYGTRLSDHTAPDHPMERAPVL

SEQ ID NO: 78563 - protein, 73 aa, Zea mays
  Coding DNA Sequence Number=SeqID_36784
MKYYLRLVLYLKINEVLFEVLLTQGSVIEPIVVVRGNEMVEINLLGEFNHISNTIDNKRSCDARVAVFRLYLK

SEQ ID NO: 78564 - protein, 34 aa, Zea mays
  Coding DNA Sequence Number=SeqID_36785
GSVIEPIVVVRGNEMVLVAHPGKWEVAAHPPSLS

SEQ ID NO: 78565 - protein, 36 aa, Zea mays
  Coding DNA Sequence Number=SeqID_36786
MEQQCHVKRVLSIYSVEVLVAHPGKWEVAAHPPSLS

SEQ ID NO: 78566 - protein, 88 aa, Zea mays
  Coding DNA Sequence Number=SeqID_36787
MSDDLVVPVHFEVGQESCFRLLDHPLLVLLELELLVSRQGANYSREPAAVLSGQARTVRGTGPDGAAEIAGGGLDLAPGRDPVGEERS

SEQ ID NO: 78567 - protein, 88 aa, Zea mays
  Coding DNA Sequence Number=SeqID_36788
MSDDLVVPVHFEVGQEPCFRLLDHPLLVLLELELLVSRQGANYSREPAAVLSGQARTVRGTGPDGAAEIAGGGLDLAPERDPVGEERS

SEQ ID NO: 78568 - protein, 88 aa, Zea mays
  Coding DNA Sequence Number=SeqID_36789
MSDDLVVPVHFEVGQELCFRLLDHPLLVLLELELLVSRQGANYSREPAAVLSGQARTVRGTGSDGAAEIAGGGLDLAPGRDPVGEERS

SEQ ID NO: 78569 - protein, 85 aa, Zea mays
  Coding DNA Sequence Number=SeqID_36790
MSDDLIVPVHFEVGQELCFRLLDHPLLVLLELELLVSRQGVNYSREPAAVLSGQAQTAPRPKTTVALGSGGTVARGAVHPAWDQG

SEQ ID NO: 78570 - protein, 64 aa, Zea mays
  Coding DNA Sequence Number=SeqID_36791
MSDDLVVPVHFEVGQELCFRLLDHPLLVLLELELLVSRQGANYSREPAAVLSGQARTVRGPRPD

SEQ ID NO: 78571 - protein, 487 aa, Zea mays
  Coding DNA Sequence Number=SeqID_36792
  Homolog annotation: Hit_ID=Q53MK8; Match level="QueryCoverage=42%, HitCoverage=20%, E-value=7e-13, Identity=30%"; Hit description=Ulp1 protease family, C-terminal catalytic domain, putative
MAAEQNVTGQQGAHTVRRSPRVENKRKQLDKNELKKRRKRLRLKVLPIQDAESDDEQDPEFVPAGDGSGDDNVGIVGGDEKKGITKTRAIRCSPGKFIKLVNALSDELKSEVVAKGFGSLLRFKPHLLSRKLLSWLMRKLNPETMKLEIGGGKEIPITEHIVWCVLQLPNVGSDPPPMSDADARALRDELGEQICGKSYRRISGINISVITDKLQKRILTGELGLRAFFMAAFQCLLFSNTDTRIRIDDVKYTQDIQNMGNKNWCKVVVDRLSIAARLYRKDFAEKGINASISGCGIFVALRSITDTCYDAPIGALAILHDPVPAPAPVADPNPTAAPNPGAAASAPVAATPTATGTSADVLGTSYDPACHASFNIQPPVFYQYPSFRSSFEAQSYSTISRDLMAKAHHECYTGIQKLIADAIVEKRAAKERRRKVKNDTRAGAGSGTSPIAPEDQSGGGDGEEIIRSPVAIDTRAGAVCIELPLML

SEQ ID NO: 78572 - protein, 388 aa, Zea mays
  Coding DNA Sequence Number=SeqID_36793
MRKVKNDPRAGAGAGTSSIAPEDQSRGGDGDEIIRSPVAIDTRAGAGSGTTSNVPEDQSGGGDSEEIQLDCSGGDLDDSLDFMRTPSCGDDIDLEEGNLNRTPPDLRGSIRSIDDILQMMYSPEHFASIDGEGAPETEEEPLSRDTGMQHPTAQDHITYSRRSDRSIQVANIQKAETEKKKAEIEMKNAEAEEAEKRKAEAEQADKKKAEEAENKRKAKAEVAEIKRKAVAEEAEKKKEEEAEDKRKAEAEEAEIKRKAEAEEAEIKRKAEAEEVEIKRMAAAEEVVKKKADGEKKVEAEEKRIQVAMQKQLKDNIKALKKPVPAAKLKKMFQLQMSKEYAEQRQQYEDRLNMLRQEAKDEIDSLEKSIDGQAGPSSSFDDIQFPAGV

SEQ ID NO: 78573 - protein, 247 aa, Zea mays
  Coding DNA Sequence Number=SeqID_36794
MLCQEAKAEIDSLEKSIDGQAGSSSSFDDIQFPAESDDDINNLTQPIRLSQDKVSVDQADFSEFQRMIFKRLGDRVLKKPREYISPFKIPRNRPEIPLAKVVALRRKIASDPELKRRILLEFGLLVGLTGIIDLFVHCMQHDDIVHKVDSCGYRVFLTTGFYVFVPIKDGAHYFVYCFNFIHKRIDVLDSNDYFLNCSNQEERHKAVFAKIPIIDAAFQKVSNLKLPRVSKWRRPFIDVPKQAGQSD

SEQ ID NO: 78574 - protein, 111 aa, Zea mays
  Coding DNA Sequence Number=SeqID_36795
  Gene Ontology: Mol. function=nucleic acid binding
  Homolog annotation: Hit_ID=Q3LRV2; Match level="QueryCoverage=68%, HitCoverage=31%, E-value=3e-26, Identity=77%"; Hit description=Gag
MGSHDPRAKRESRLMGKVCDLCRGLETDISAVLTVAFGAIYAQVPKVGDKDYDSDEADKIRHFNSQATTILLASLCREEYNKVQGLKTAKEIWDVLNIAHEGDEVTKITKR

SEQ ID NO: 78575 - protein, 98 aa, Zea mays
  Coding DNA Sequence Number=SeqID_36796
MGSHDPRAERESRLMGKVCDLCRGNETGSDEGQLAMVAPGAEIATAAIVPKARGEALDAGGEVSALAVVRDEAGAATRRLKGVTEALSQATEALRQVR

SEQ ID NO: 78576 - protein, 85 aa, Zea mays
  Coding DNA Sequence Number=SeqID_36797
MGSHDPRAERESRLMGKVCDLCRGNETDISAVLTRYLIRDGWFTDDDDDGYDYGNGCLWCNLCSGKEEGVEVDLQEFQDFDEFED

SEQ ID NO: 78577 - protein, 78 aa, Zea mays
  Coding DNA Sequence Number=SeqID_36798
MGSHDPRAKWESRLMGKVCDLCRGKETDISAVLTRYLIRDGWFTDDDDDDDGYDYGNGKEEGVEANLQEFQDFDEFED

SEQ ID NO: 78578 - protein, 122 aa, Zea mays
  Coding DNA Sequence Number=SeqID_36799
MALIRTWRYLLMYFTPETLLNHVFEDLRKPKAPNIHSIKLSYLMEDRAASTINWYQISRLPASRFLTPFWGDPNLIRYLGEDQQGLGKGQGVEEEQQGRPQQEGDQVRVGCDSISGSRTSLH

SEQ ID NO: 78579 - protein, 109 aa, Zea mays
  Coding DNA Sequence Number=SeqID_36800
MTKVMLAEGVQNSRSGSEFTGGTGRSPCKITLMPFTFINNSMIILRGLIWFFIFKSVSFSAVLPKLFYTQLRLYANLRVPCASSYCGSDPSPKIPVNVLYSRNIVKSCF

SEQ ID NO: 78580 - protein, 124 aa, Zea mays
  Coding DNA Sequence Number=SeqID_36801
MTDDYVGALRGNSRVTYDDVGVLEKNGNDIKLQMYLQLVRSPCKITLMPFTFINNSMIILRGLIWFFIFKSVSFSAVLPKLFYTQLRLCANLRVPYASSYCGSDPSPKIPVNVLYSRNIVKSCF

SEQ ID NO: 78581 - protein, 109 aa, Zea mays
  Coding DNA Sequence Number=SeqID_36802
MAHRRAWSTRASGRPKSGEVDLGLPVKSCRVRGLGKLHGPLAELAEALARLGDGWSGLATVAEALAAVEGGKELAGAKEGWLAGDEIWSPEIRSVSLLKPEANPGFCRV

SEQ ID NO: 78582 - protein, 49 aa, Zea mays
  Coding DNA Sequence Number=SeqID_36803
MKLSKPSDPAGLHRKPEIDFTKLRSPACTRGPSSPSLKLKIETDQTLFN

SEQ ID NO: 78583 - protein, 213 aa, Zea mays
  Coding DNA Sequence Number=SeqID_36804
MLNSSLGSLLLVLFLDRSLLGDEHKLQLLTVYDLLELDKVNFTYVRPLGGILGKLGQTLAKFFLTDQSLGYYSNESLTLQKTPRVLLILTRGPSPNLNSNRGGRKGGGAYRRRDCSGEVVKDVGEVSGITAMCGSPSGMVGVGRSTCAGGDARRRRGVRPAHGAIVQLNGSESFTKEQGRGVREELKNGSPESLVHARRRANEVRVKSISGFR

SEQ ID NO: 78584 - protein, 239 aa, Zea mays
  Coding DNA Sequence Number=SeqID_36805
  Pfam annotation: Domain name=Collagen; Domain location=154-214; Score= -47.4; E_value=0.093; Accession=PF01391.8; Description=Collagen triple helix repeat (20 copies)
MAIQRQRSTLTEGTVQHSTAQKKSLKILATHPMGVPKGCLGRGRRGCGWPRHADGKRKRAPSPPLEDFGDSEYSEEASSESDRSPAPASPPASSEDSDASMGLPTAARAYWRSIERVGLGGSDESGVSSDGADSSDSSEEWRGGDGDDEGDVSGDDNDEGDGGDNGSEGDIGNDSGDDGDDGDNGSKGDGGDGSNKGDGGDSSGDGGKGDSGKGDGGGSSNGGKGDGSGGKASGIVPLV

SEQ ID NO: 78585 - protein, 139 aa, Zea mays
  Coding DNA Sequence Number=SeqID_36806
  Pfam annotation: Domain name=Collagen; Domain location=54-114; Score=- 47.4; E_value=0.093; Accession=PF01391.8; Description=Collagen triple helix repeat (20 copies)
MGLPTAARAYWRSIERVGLGGSDESGVSSDGADSSDSSEEWRGGDGDDEGDVSGDDNDEGDGGDNGSEGDIGNDSGDDGDDGDNGSKGDGGDGSNKGDGGDSSGDGGKGDSGKGDGGGSSNGGKGDGSGGKASGIVPLV

SEQ ID NO: 78586 - protein, 120 aa, Zea mays
  Coding DNA Sequence Number=SeqID_36807
  Pfam annotation: Domain name=Collagen; Domain location=35-95; Score= -47.4; E_value=0.093; Accession=PF01391.8; Description=Collagen triple helix repeat (20 copies)
MGAPHRGPGRTGAPSSASGSEWRGGDGDDEGDVSGDDNDEGDGGDNGSEGDIGNDSGDDGDDGDNGSKGDGGDGSNKGDGGDSSGDGGKGDSGKGDGGGSSNGGKGDGSGGKASGIVPLV

SEQ ID NO: 78587 - protein, 257 aa, Zea mays
  Coding DNA Sequence Number=SeqID_36808
  Homolog annotation: Hit_ID=Q8LD08; Match level="QueryCoverage=39%, HitCoverage=31%, E-value=2e-11, Identity=52%"; Hit description =Protein phosphatase-like
  Subcellular localization annotation: CTP_CleavageSite=43; ConfidenceScore=5.51e-01
MASTDASWLGCQTKCIPGSSARTLTQRQQRPSSQRTRIHGRPVATYVNNPRVAGVGDDHEIPLFDDGQRSAAALDRFQVTAAPELTVHSGVCGHVGLLPEVELAVVKLLLVVDERRQRSPPASGVCSGFPTRRGMYVGMRMGFAGRGNEKCRTRNENGRECITRNENGREWWQNMRMDSAGRGNGKGRTGNENGNCAGRGEWKSRTENGNGRTWNGSLPLTALISCRDLIGSLLFWQLYGLYIIFTGTICYNSRRGT

SEQ ID NO: 78588 - protein, 68 aa, Zea mays
  Coding DNA Sequence Number=SeqID_36809
  Gene Ontology: Mol. function=protein phosphatase type 2C activity
  Homolog annotation: Hit_ID=Q1SGL9; Match level="QueryCoverage=73%, HitCoverage=13%, E-value=5e-09, Identity=60%"; Hit description =Protein phosphatase 2C-like
MHFVWQPSQEASVLAMSCASDDYYIKDCGVISAPEVTQRRTDSNDQFVILATVEIAFVPYKADSNKST

SEQ ID NO: 78589 - protein, 80 aa, Zea mays
  Coding DNA Sequence Number=SeqID_36810
  Gene Ontology: Mol. function=protein phosphatase type 2C activity
  Homolog annotation: Hit_ID=Q1S458; Match level="QueryCoverage=77%, HitCoverage=20%, E-value=9e-09, Identity=53%"; Hit description =Protein phosphatase 2C-like
MAPSRSPAHHPPKAQPATQVPTIKDCGVISAPEVTHRRTDSNDQFVILATVRVWDVLSNDETMQIVAYIEVCMILMVVMK

SEQ ID NO: 78590 - protein, 87 aa, Zea mays
  Coding DNA Sequence Number=SeqID_36811
MARRRPGSTVADLRGCTEDGGGRGRAGFWAQVAGGGAVASSTRDVGAETAATRSSGGGYAETAEMTAGARGQRERGKRARARGKRAR

SEQ ID NO: 78591 - protein, 247 aa, Zea mays
  Coding DNA Sequence Number=SeqID_36812
  Homolog annotation: Hit_ID=Q6I628; Match level="QueryCoverage=33%, HitCoverage=29%, E-value=1e-17, Identity=83%"; Hit description =Putative phosphatidylserine synthase
MNVCELTLAVSHPPTGEDQVKRSLSQFTPAQWDKDQWHPFMGPLRFIHPNHPRVQLLLARQQTGEEGWSLLLALSSYMHSGAAYLHEVWAWGTGGGRSTAKRLGGGAKGLRRAIERDRRQYKGREGAGEVPYLKADSGNSSVAAMARRRPGSTVADLRGCTEDDGAGEVREGVCWCANGGGGRGRAGFWAQVAGGGAVASSTRDVGAETAATRSSGGGYAETAELTAGARGQRERGKRARARGKRAR

SEQ ID NO: 78592 - protein, 424 aa, Zea mays
  Coding DNA Sequence Number=SeqID_36813
  Gene Ontology: Mol. function=CDP-diacylglycerol-serine O -phosphatidyltransferase activity; Cellular component=integral to membrane; Biological process=phosphatidylserine biosynthetic process
  Homolog annotation: Hit_ID=Q6I628; Match level="QueryCoverage=96%, HitCoverage=90%, E-value=0.0, Identity=82%"; Hit description =Putative phosphatidylserine synthase
  Pfam annotation: Domain name=PSS; Domain location=144-408; Score =547.0; E_value=1.9e-161; Accession=PF03034.6; Description =Phosphatidyl serine synthase
MEAKQRPRHGEERRPPATDNGGGGGEEYDPWTAWLYKPHTISVLLVGACLLIWASGALDPEGAAAHSSLTSIKRGVWAMIAAFLAYCTLQAPSTAPGNFVTGYLLGPILLSGAWYMDWLSFTSLLYLPPFPVLATQSEAHTGSYLFLIFQNRDDARQFMKHLHPDLGVELPERSYGADCRLYVPENPKNKFINIYETLFDEFVVAHILGWFGKAVMIRNQLLLWVLSIGFELMELTFRHMLPNFNECWWDSIILDILICNWFGIWAGMHTVRYFDGKTYEWVGLSRQRSIMGKVKRSLSQFTPAQWDKDQWHPFMGPLRFIQVLFLCVVFMTVELNTFFLKFCLWIPPRNPLVVYRLILWWLIAIPTIREYNSYLQDSKPAKKVGAFCWLSLAICIVELLICMKFGHGEGVYVKKAANRLPDIQ

SEQ ID NO: 78593 - protein, 96 aa, Zea mays
  Coding DNA Sequence Number=SeqID_36814
  Gene Ontology: Mol. function=triose-phosphate isomerase activity; Cellular component=cellular_component; Biological process=fatty acid biosynthetic process
  Homolog annotation: Hit_ID=P12863; Match level="QueryCoverage=73%, HitCoverage=28%, E-value=2e-28, Identity=87%"; Hit description =Triosephosphate isomerase, cytosolic
  Pfam annotation: Domain name=TIM; Domain location=4-91; Score=-100.9; E_value=0.00017; Accession=PF00121.9; Description=Triosephosphate isomerase
MGPGKVRHPSSGSGKFVLLWLTLRFALCSQVHASLRDWVKINVSPEVSESTRIIYGGSVTAANCKELAAQPDVDGFLVGGASLKPEFIDIINAAAV

SEQ ID NO: 78594 - protein, 153 aa, Zea mays
  Coding DNA Sequence Number=SeqID_36815
  Gene Ontology: Mol. function=triose-phosphate isomerase activity; Cellular component=chloroplast; Biological process=fatty acid biosynthetic process
  Homolog annotation: Hit_ID=P12863; Match level="QueryCoverage=90%, HitCoverage=55%, E-value=2e-59, Identity=84%"; Hit description =Triosephosphate isomerase, cytosolic
  Pfam annotation: Domain name=TIM; Domain location=1-153; Score=76.0; E_value=1.2e-19; Accession=PF00121.9; Description=Triosephosphate isomerase
NGTTDQVEKIVKTLNEGNVPSSDVVEVVVSPPYVFLPVVKSQLRQEFQVAAQNCWVKKGGAFTGEISAEMLVNLGVPWVILGHSERRALLGESNEFVGDKVAFALSQGLKVIACVGETLEEREAGSTMDVVAAQTKAIAVVGCCLSGVTVELL

SEQ ID NO: 78595 - protein, 598 aa, Zea mays
  Coding DNA Sequence Number=SeqID_36816
  Homolog annotation: Hit_ID=P12863; Match level="QueryCoverage=37%, HitCoverage=94%, E-value=1e-102, Identity=83%"; Hit description =Triosephosphate isomerase, cytosolic
  Pfam annotation: Domain name=TIM; Domain location=376-593; Score =331.9; E_value=1.1e-96; Accession=PF00121.9; Description =Triosephosphate isomerase
MTVRPFGSIHIRWTSAKKAGPHVMDRERGRCGKDPSRRRKRAPSPPTDQGFEGWPLGRVSTAALEHSDFKPITDQGFEGWPLGRAGPSEGFNSRPRARRVRDDSGYVRYIAEARATLLRQVHASPEGLLRQRVPPRLSRGSARAGFIVKQPWPYRLTNRPLRRRIKCRGCLTPYPDTHASVGQAEVTAVTSPLFFTIRHDRKTASLAPLRLPCQPPRQRLTTSHDQPPSSSLGRNRKLRLARPHAPASEGGFRLARPHAPALRGDLRLARPSDSASTPVSGGIASSPDPGLDLKRSLRLDRPWAQTDRANRGNIISLFLACSGYEEQDRRPIWLTPATGLRRSSGGHAITCTGPKLSPNGHVGMYTGLRHSTAGYNGTTDQVEKIVKTLNEGNVPSSDVVEVVVSPPYVFLPVVKSQLRQEFQVAAQNCWVKKGGAFTGEISAEMLVNLGVPWVILGHSERRALLGESNEGLKVIACVGETLEEREAGSTMDVVAAQTKAIAEKIKDWSNVVLAYEPVWAIGTGKVATPAQAQEVHASLRDWVKINVSPEVSESTRIIYGVTAANCKELAAQPDVDGFLVGGASLKPEFIDIINAAAV

SEQ ID NO: 78596 - protein, 113 aa, Zea mays
  Coding DNA Sequence Number=SeqID_36817
MAGVGRSTHAGGDARRRRGVRPGHGEIEELDGSERIPKSGEVDLGPPVKSGRVQGLGKLHGPLEELAEALARHEGGWSGLATVAEALAAMAGGIKLAGAKGKWPADEDECGAK

SEQ ID NO: 78597 - protein, 159 aa, Zea mays
  Coding DNA Sequence Number=SeqID_36818
NRGGRKGGGAYRRRDCSGEVVEDAGEVSGITTVCGSPSEMAGVGRSTRAGGDARRRRGVRPGHGEIEQLDGSERFTGCQRRYGCKESVRDSLDSSVHARRRKTEVRGLATVAEAMAAMAGGIELAGAKERGLAGEEIWSQEIRSVSLLKPEANPRFCRV

SEQ ID NO: 78598 - protein, 137 aa, Zea mays
  Coding DNA Sequence Number=SeqID_36819
MAGVGRSMRAGGDARRRRGVRPGHGEIEQLDGSERFMGCQRRYGRKELVGDSLDSSVHARRRKTEVRLLAELAEALARLEDGWSGLATVAEALAAMARGIKLAGAKERGLAGEEIWSQEIRSVSLPKPEANPRFCRV

SEQ ID NO: 78599 - protein, 75 aa, Zea mays
  Coding DNA Sequence Number=SeqID_36820
  Gene Ontology: Mol. function=structural constituent of ribosome; Cellular component=intracellular; Biological process=translation
  Homolog annotation: Hit_ID=Q10GV3; Match level="QueryCoverage=74%, HitCoverage=25%, E-value=1e-09, Identity=68%"; Hit description =Ribosomal 5S rRNA E-loop binding protein Ctc/L25/TL5 containing protein, expressed
MGEDDKVIVERCAREWSRPPAAPHHRQEATRGDAQAVTLFPLHPRPPLGPRGRPIQRGTVLPIKVPGSEQASHKN

SEQ ID NO: 78600 - protein, 321 aa, Zea mays
  Coding DNA Sequence Number=SeqID_36821
  Homolog annotation: Hit_ID=Q9C815; Match level="QueryCoverage=27%, HitCoverage=50%, E-value=8e-21, Identity=45%"; Hit description =Peptide chain release factor, putative; 8726-9996
  Pfam annotation: Domain name=RF-1; Domain location=2-112; Score= -19.7; E_value=0.0021; Accession=PF00472.11; Description=Peptidyl -tRNA hydrolase domain
MEQCDMGTFKASGPGGQHRNKRESAVRLKHLPTGIIAQILPLKSSVRGKDVGPQIGPNNSKFSPEMQALLDLLFAVEGSVSDAAKILGCADPGPPPHTASPFAWAPPCRDLRRGAADPGTPARPDLAVSAHGSRPLARSRHALTVEAPLSATLARPPPASPTVTSTPAAPPPSDAPTTPPSPCPLSLPQCDAPPCHGALASAPIKHLPPPTLSHDLCRHVSAVVRNWFRLDLRLVAIPILILFRAPTPTLHPISDMGEDDKVIVERCARERSCPPAAPHHRQEAARGDAQAVTLFPLHPRPPLGPRGRPIQQGTVLPFKVT

SEQ ID NO: 78601 - protein, 291 aa, Zea mays
  Coding DNA Sequence Number=SeqID_36822
  Homolog annotation: Hit_ID=Q9C815; Match level="QueryCoverage=40%, HitCoverage=45%, E-value=3e-40, Identity=70%"; Hit description =Peptide chain release factor, putative; 8726-9996
  Pfam annotation: Domain name=RF-1; Domain location=145-270; Score =23.1; E_value=1e-06; Accession=PF00472.11; Description=Peptidyl-tRNA hydrolase domain
MPYEVSRDDTRHILLLNDSCQVVRGRVVSPGSAFSQSAPSIYMRQIITVRLVASASSLLHPSIATARYPPLPASPALLQPRPLPLLRCHAPSQYKSQLRFLSSLSSSSVPTSSDAPSDGGGGRDGEEDGAKSGDHVDYLGMSNEELMEQCDMGTFKASGPGGQHRNKRESAVRLKHLPTGIIAQVVEDRSQHKNRASALSRLRTLIALKVRRPINLEDYTPPVELLQILPLKSSVRGKDVGPQIGPNNSKFSPACSCCYNSMANALCDSRLEGVDRRNLKIKLYPPTRSLD

SEQ ID NO: 78602 - protein, 88 aa, Zea mays
  Coding DNA Sequence Number=SeqID_36823
MVVVAVGGGGGGGWGTWEELVLGGAVLRHGGAAWATVAEELRTRSPCTFSAEAVIGYDLQCKCNDFDFLSRTKGSPETIMYALMKCDT

SEQ ID NO: 78603 - protein, 626 aa, Zea mays
  Coding DNA Sequence Number=SeqID_36824
  Gene Ontology: Mol. function=DNA binding
  Homolog annotation: Hit_ID=Q84YJ6; Match level="QueryCoverage=27%, HitCoverage=24%, E-value=1e-07, Identity=29%"; Hit description=DNA -binding protein family-like
  Pfam annotation: Domain name=Bromodomain; Domain location=378-466; Score=25.9; E_value=8.4e-06; Accession=PF00439.15; Description =Bromodomain
MVVVAVGGGGGGGWGTWEELVLGGAVLRHGGAAWATVAEELRTRSPCTFSAEAVIGYDLQCKCNDFDFLSRTKGSPETIMYALMKCDTECEAKFAEIQLRYSACNAWFEELRKQRVAELKRELEKSENSIGSLQSVIQSLSNSKHVDGSSEYHTSHTESCPRSENTADTNSSGKETSRDRSSAASFTEEASNSQKSQKVQQCDTDSIQAINPSPDESYPQAQVEKVGPKDGLLWGSRKQRGGRARRTLLKGGDSSGDGEPTSTAFIQREGSSKGCMKNFITPKVEPVVMKKGVKIPKVESGVMNKDLKTSNVGSGIMKKCLKTPNAQADMLKKDVRTPKAESDVIKKGLKIPKVEPDVMKKGLRSSKAECGQPVIERVKLKLAEILNTISTQDDCKMLQCQLDTQRKRARYKKMIRRHMDFRMLHSKIKSGAISCTKELLRDVLIFINNVITFYPKATLEHMAAVELRESACKTVKQSASLFLKSHGEIGTAGAPVVKNTRVLQPRCPGPGDARPSKVSSRDATAREGDGKRPSDQLANQKTIQRNEPAKKRGVGRPPKSGHRIAGAQEDSPIKGRKRGAGAQEGSPINGRKRGAGAQLDSPGKGRKRSAAAQENNPSKGGKKSRR

SEQ ID NO: 78604 - protein, 405 aa, Zea mays
  Coding DNA Sequence Number=SeqID_36825
  Homolog annotation: Hit_ID=Q7XIK6; Match level="QueryCoverage=30%, HitCoverage=29%, E-value=2e-27, Identity=53%"; Hit description =Putative lysine ketoglutarate reductase trans-splicing related 1
  Pfam annotation: Domain name=Bromodomain; Domain location=1-61; Score= -9.8; E_value=0.017; Accession=PF00439.15; Description=Bromodomain
RKRARYKKMIRRHMDFRMLHSKIKSGAISCTKELLRDVLIFINNVITFYPKATLEHMAAVELRESACKTVKQSASLFLKSHGEIGTAGAPVVKNTRVLQPRCPGPGDARPSKVSSRDATAREGDGKRPSDQLANQKTIQRNEPAKKRGVGRPPKSGHRIAGAQEDSPIKGRKRGAGAQEGSPINGRKRGAGAQLDSPGKGRKRSAAAQENNPSKGGKKSRRRSHDTISTTGVLAAKAPARSCDEWRSSTAHSALSSEGLPPAAASSPAPLVATNGKGGDRCPKMKLRLHLFVLCVIIIFLVYNMANFQHKQTTRQVFLFLNYDMCLQCKHQVSDRDAVKVPQKAEARIGYLPHGIVESNSDMDLKPLWLTTSARSKQKPKQNDNFLIAIAAGINQKKTVDAIMKK

SEQ ID NO: 78605 - protein, 155 aa, Zea mays
  Coding DNA Sequence Number=SeqID_36826
  Gene Ontology: Mol. function=3-deoxy-7-phosphoheptulonate synthase activity; Cellular component=chloroplast; Biological process =aromatic amino acid family biosynthetic process
  Homolog annotation: Hit_ID=Q75W16; Match level="QueryCoverage=59%, HitCoverage=17%, E-value=9e-44, Identity=91%"; Hit description =Phospho-2-dehydro-3-deoxyheptonate aldolase 2, chloroplast precursor
  Pfam annotation: Domain name=DAHP_synth_2; Domain location=3-153; Score=-180.8; E_value=5.1e-08; Accession=PF01474.7; Description =Class-II DAHP synthetase family
MTQFLKDEGVVLSPEDENKREKVIRELKKIVMHWANAVAYEQSVPQGLATATVLTYDSYTLGVGRMAGQFAKPRSEPLEERDGVKLPSYRGDNVNGDDFTEKSRVPDPQRMIRAYSQSVATLNLLRALATGGYAAMQRVTQWNLDFMDHSEQGDR

SEQ ID NO: 78606 - protein, 571 aa, Zea mays
  Coding DNA Sequence Number=SeqID_36827
  Homolog annotation: Hit_ID=Q7GCL7; Match level="QueryCoverage=47%, HitCoverage=54%, E-value=9e-84, Identity=58%"; Hit description=NAC domain-containing protein 74
  Pfam annotation: Domain name=NAM; Domain location=304-432; Score =246.5; E_value=5.8e-71; Accession=PF02365.6; Description=No apical meristem (NAM) protein
MEWEEAGRMPPNMYRCFTGLCEAASQGGAIPTAATGGNNKVKVFGSDGKVWFAGRLHRYTTLSATADWRSSPDNSSAPYPSAEPGPARNTSQLVKSPCGSPAGSQRASSGTWRSDPTSRRATNTTSLPHPAVQPIQLTPRPMARAPGVRTPALSKRPSPAAPSRQRAVKNAGARSAPVASLPCWLWLLRPSHPIGLSPPLPSRSSQPSPDASSPPGVQSLPVLTRSLDRTPPGGALPPCFSGLLLAARRPAAPSWWFRGAPVGRDRPCGHPALSLRRGVPGSRGRLHSVCGIYCKMEVLRDMHLPPGFGFHPSDTELVSHYLKRKILGQKIEYDPIPEVDIYKHEPWDLPAKCNLPIEDNKWHFFASRDRKYPTGSRSNRATLAGYWKSTGKDRAIKLKKRTLGTKKTLVFHEGRPPSGRRTEWIMHEYYIDENECKVSPDMKDAFVLCRVTKRSDWELDNEVGNRYPHLEQLDAAAASVASTVKPEDAVATVICPEESNRAATPVGSDELSNDVGQEPITPDSSPPNGGKELEVWLEELLDPSPSFNLVADTRSADVSLTDQYAESSVSF

SEQ ID NO: 78607 - protein, 52 aa, Zea mays
  Coding DNA Sequence Number=SeqID_36828
MEWEEVGRMPPNMYRCFTGLCEAASQGGAIPAAAVGAYGHCTGSLDRALRQS

SEQ ID NO: 78608 - protein, 409 aa, Zea mays
  Coding DNA Sequence Number=SeqID_36829
  Gene Ontology: Mol. function=protein binding; Biological process =ubiquitin cycle
  Pfam annotation: Domain name=F-box; Domain location=17-64; Score =24.5; E_value=0.00037; Accession=PF00646.23; Description=F-box domain
  Pfam annotation: Domain name=Kelch_2; Domain location=266-317; Score =30.0; E_value=8.2e-06; Accession=PF07646.5; Description=Kelch motif
  Pfam module annotation: Pfam domain module=F-box::Kelch_2; Domain location=17-64::266-317
MAAGSGPAPPAEAQPPPPIHHLPPDALHNVLLRLQLRDAVVCRPVSRLFHETLSPQLLALLPSLRLLLLRHPRPDGGGCLHAFDPARRTWLRLPFAHFLPYHSFSPVASSTSLLYLWVETSSSTSPLALPPSTSSASSASPVHPPKSLAVCNPFAGTYRLLPQLGSAWARHGTVLAGPAGTVLVLTELAALSYTPSGSAKWMKHPLSLPSKPRSPILASDAVFALCDVGTPWRSQWKLFSCPLAMLTGGWAPVERAAWGDVFEVLKRPRLLAGAGGRRVLMIGGLRSSFAMDAPCSTVLILRLDLATMEWEEAGRMPPNMYRCFTGLCEAASQGGAIPAAAAGGNNKVKVFGGDGKVWFAGKRVRGKLAMWEEDEMGSSGKWDWVDGLPGYGDGVYRGFVFDGGFTAIP

SEQ ID NO: 78609 - protein, 129 aa, Zea mays
  Coding DNA Sequence Number=SeqID_36830
MRISRDLAWFRIPRVSCGLWMVNYMEYWIGSSLSDNVTQNDITKYSRLNTKKGHQGTDHHADEDGGSSYDVEIIETPCSTTYIIMCSARYININKHTRTGALCTYIMEIDDTEYLDIYDLSLTMKTNVY

SEQ ID NO: 78610 - protein, 519 aa, Zea mays
  Coding DNA Sequence Number=SeqID_36831
  Gene Ontology: Mol. function=cysteine-type peptidase activity; Biological process=proteolysis
  Homolog annotation: Hit_ID=Q109R5; Match level="QueryCoverage=90%, HitCoverage=46%, E-value=4e-69, Identity=33%"; Hit description=Ulp1 protease family, C-terminal catalytic domain containing protein
  Pfam annotation: Domain name=Peptidase_C48; Domain location=70-271; Score=-12.6; E_value=0.0049; Accession=PF02902.9; Description=Ulp1 protease family, C-terminal catalytic domain
VTPLSSLDVQNESTQISSDVDTLEQIEQDNLDTLIRICEHNKPKKLNVARVLPKDYTCTTEDLQLIEYIKSLPGKQVVVLSAYIHSIRDEEHILHREGGKVFLESTFISSLLKRDGDPKILLNCKEDTLENRVDNYLQADMVFIPINIENFHWYLAIVNAKKNEVHILDSMGPQITDRRDLYTTLKGLERQIKIVAEHKELNRDKWSDIDVTSWPVIEKITKQMQTDGVSCGLWMVNYMEYWTGSSLSNNITQNDITKFRFKLPAILWNSRLNTKKGHQETNHHADEDGGSSCDVEIIKTPCELPISLNASSQVQPFISSCALPATLTSTNTQELMSALCTYIMEIDDAEYLEKHWIQSTKPYPISLSLQQLKNILDVNKPMDKDCFNIAVRMIACSDALFLLENKYHYMDLQFCSITNYGQDPRLRAKLDTNVLANLFECWPDMEYTISDCSQILLPFCFLGHFSLYVFNMNTRSIYIMDSMPLPSWFKGNDPSMHYIHKIHNIANNMNVAMKLANPT

SEQ ID NO: 78611 - protein, 1557 aa, Zea mays
  Coding DNA Sequence Number=SeqID_36832
  Gene Ontology: Mol. function=helicase activity; Biological process =viral genome replication
  Homolog annotation: Hit_ID=Q8LML8; Match level="QueryCoverage=57%, HitCoverage=62%, E-value=0.0, Identity=69%"; Hit description =Putative DNA helicase homolog
  Pfam annotation: Domain name=DUF889; Domain location=708-938; Score =301.8; E_value=1.3e-87; Accession=PF05970.5; Description=Eukaryotic protein of unknown function (DUF889)
  Pfam annotation: Domain name=Peptidase_C48; Domain location=1024 -1225; Score=-12.6; E_value=0.0049; Accession=PF02902.9; Description =Ulp1 protease family, C-terminal catalytic domain
  Pfam module annotation: Pfam domain module=DUF889::Peptidase_C48; Domain location=708-938::1024-1225
MDSVYAGEHRASALGKLWVLPASFIGGPRDMRRRYMDAFALVQKYGKPDIFLTMTCNPNWEEITSELEPGQKSQDRCDLVVRVFKAKLDNLKHQLFKKHILGVVAAHVYVIEFQKRGLPHAHFLLIMQTGSKLTVLDQYDAVISAELPDKNRFPELFDMVVKHMMHGPCGHLNMQNTCMKNGSCKCHYPRLFGETTLQGKDSYPIYRRRDDGQKVRVRGHDLDNRWVVPYNPTLLRMYDCHINVEVCSSIKAVKYIYKYIHKGHDRASVTVIDVDGGQSINEIENFRDARWVSPQEALWRIYSFDLHGISPPVLQLQLHLPGMHLVSYNINDDMRQVLNKDNIDKSMLTEYFRANQLFDWASNYLYREFPEVARWWPGAKKWTARQQRMQVGRIVSAHPAEGEHYYLRVLLNHVRGATSFESLRTYDGNVYPTFREAAEKRGLIEADNSIDECLTEASGFHMLPSLRRLFATILVFCEPTDVVGLWNKHLEAMSDDFCRTHSNSNVVEQLVLLDIRDMLQTMGKDIRLFPLPAIKDEHDNMADVVREIFEEMNIPEDPEAEFVVSSLNHEQRHAYDVILSSVENISGGVFFVDGPGGTGKTFLYKALLATVRRSGKIAIATATSGVAASIMPGGRTAHSRFKIPLNIKEGDVCSFTKQSGTAKMLRRSSLILWDEATMTKRQAIEALDKSMRDIMDRPDLPFGGKTVVFGGDFRQVLPVVRKGTRAQIINSTLRRSSLWDSMQHLRLVRNMRAQSDQWFSDYLLRIGNGIEETCNDDNVRLPDEICIPYTGEDDDVDRLIEEIFPSLETNMHNRDYITSRAILSTKNENVDKINMRFIDRFSGQEMVYHSFDVAVDDPNNNYPPEFLNSLTPSGLPPHILKLKVNCPVILLRNLDPPNDMDEEKVDVGTIVNPSFEVMAGSGCSAQILIKCSDTHELDNNDGENIKDIVGNVVEQSLDVVAVGSDPVHVSAKPMLENNRIEQDNLDTLIRICEHNKPKKLNVARVLPKDYTCTTEDLQLIEYIKSLPGKQVVVLSAYIHSIRDEEHILHREGGKVFLESTFISSLLKRDGDPKILLNCKEDTLENRVDNYLQADMVFIPINIENFHWYLAIVNAKKNEVHILDSMGPQITDRRDLYTTLKGLERQIKIVAEHKELNRDKWSDIDVTSWPVIEKITKQMQTDGVSCGLWMVNYMEYWTGSSLSNNITQNDITKFRFKLPAILWNSRLNTKKGHQETNHHADEDGGSSCDVEIIKTPCELPISLNASSQVQPFISSCALPATLTSTNTQELMSALCTYIMEIDDAEYLEKHWIQSTKPYPISLSLQQLKNILDVNKPMDKDCFNIAVRMIACSDALFLLENKYHYMDLQFCSITNYGQDPRLRAKLDTNVLANLFECWPDMEYTISDCSQILLPFCFLGHFSLYVFNMNTRSIYIMDSMPLPSWFKGNDPSMHYIHKIHNIANNMNVAMKLANPTWKDDIYMWRRIVPSWVPKTLNWDLSGFLVINFMHSWNGKRLPCISTTSSVLRTKFLVELMKYQDNECNDNIPEEIQKIIKRISV

SEQ ID NO: 78612 - protein, 89 aa, Zea mays
  Coding DNA Sequence Number=SeqID_36833
  Subcellular localization annotation: CTP_CleavageSite=67; ConfidenceScore=5.32e-01
MARNSASSLLVWCLLRARRNAAASSGHEIPSVLLASTRSAQSRPKALRGCLDSPTLRRRSARFDRLRVSHRRPLSTSRLAHRSSAKSPN

SEQ ID NO: 78613 - protein, 215 aa, Zea mays
  Coding DNA Sequence Number=SeqID_36834
  Subcellular localization annotation: CTP_CleavageSite=8; ConfidenceScore=5.33e-01
MARASFFRAAEAPPHGAPTPCYIFSQPPLTLPRQPKQGPSSPWRPSPLLPAVTPRIFSSREPLPMGATPLQFPLAGAQKSQQHAPSPRALSARRNAAASSGHEIPSVLLASARSAQSRPKASRGCLDSPTLRRRSARFDRLRVSLRRICAAPTSTPFTPARNPVFCVEKASRSTLVDVRSYAHIESPTFLQTPIGFVYGSHLRLENKKLFAVCDL

SEQ ID NO: 78614 - protein, 290 aa, Zea mays
  Coding DNA Sequence Number=SeqID_36835
SGEVRRVDGRTAQIDDVVWGCPNTHATPWVGTAQIGPMQATQRGSHDRCSLRHFVEHSTREAKEHAAAISGRRQGEIAGGWRPWEEALCWKKFWASRLGAGGSASMGKKAPALAVLGGKKAGVELLDMGSLERRLHSLSRASAIGAAGNGNRWLLEVEDDGENCSQGEAPAGKMEARASSGWLLPAPRSIGGDSKGADPHHGELLRTEEERIPAPNAVEKRGAGRDGSRKLGCHGWERDGEGSSLVAVAGVKQGGRSWRLEIFEGWEWKIAKGKGRGVHIYRGALGLWFP

SEQ ID NO: 78615 - protein, 208 aa, Zea mays
  Coding DNA Sequence Number=SeqID_36836
  Gene Ontology: Mol. function=zinc ion binding
  Homolog annotation: Hit_ID=Q10LJ3; Match level="QueryCoverage=69%, HitCoverage=19%, E-value=2e-36, Identity=49%"; Hit description=JmjC domain containing protein, expressed
MADLAGTTSSVVHAQGLQDLMTTLRAFEDVNHWLQTKFSQVDIELKQFIKGYSDALQPELGMKLLIAHGSHQELGKGDSMTNLMINMCDVVHMLMHATEVHYQCPKSVRVQSDVSERIANGTSVHVNIPVQNLNLDIEEQSHKHSISHIQEPNTNNSEGSLAGAAVWDVFRRQDLPKLNEYLAVHREECAARCQAVSSVMTHFFPMSN

SEQ ID NO: 78616 - protein, 306 aa, Zea mays
  Coding DNA Sequence Number=SeqID_36837
  Gene Ontology: Mol. function=structural constituent of ribosome; Cellular component=intracellular; Biological process=translation
  Homolog annotation: Hit_ID=Q9M4X0; Match level="QueryCoverage=39%, HitCoverage=25%, E-value=9e-56, Identity=92%"; Hit description=UDP -glucose pyrophosphorylase
  Pfam annotation: Domain name=KOW; Domain location=255-291; Score =22.1; E_value=0.002; Accession=PF00467.19; Description=KOW motif
  Pfam annotation: Domain name=Ribosomal_S4e; Domain location=184-250; Score=61.4; E_value=2.9e-15; Accession=PF00900.10; Description =Ribosomal family S4e
  Pfam module annotation: Pfam domain module=KOW::Ribosomal_S4e; Domain location=255-291::184-250
MFFDHAIGINVPRSRFLPVKATSDLKLVQSDLYTLVDGFVTRNSARTNPSNPSIELGPEFKKVGSFLGRFKSIPSIVELDILKVSGDVWFGSGIVLKGKVTITAKPGVKLEILDGAVIGNKVHMLMHATEVHYQCPKRVRVQSDVSERIANGTSVHVKYPIYDQTVYLNDYHKKMLKDQYEGLKTIEQITMDSASVETNMFKLCKVRFVQFGQKGIPYLNTYDGRAIRYLDPLIKANDTIKIDLETNKIMDFIKFDVDNMVMVTGGRNTERVGVIKNREKHKGSFCCLELFAMSSFLLFVVQENLE

SEQ ID NO: 78617 - protein, 199 aa, Zea mays
  Coding DNA Sequence Number=SeqID_36838
  Gene Ontology: Mol. function=nucleotidyltransferase activity; Cellular component=cytosol; Biological process=metabolic process
  Homolog annotation: Hit_ID=Q9M4X0; Match level="QueryCoverage=51%, HitCoverage=21%, E-value=1e-45, Identity=91%"; Hit description=UDP -glucose pyrophosphorylase
  Pfam annotation: Domain name=UDPGP; Domain location=1-199; Score= -165.5; E_value=5.5e-09; Accession=PF01704.8; Description=UTP- -glucose-1-phosphate uridylyltransferase
  Subcellular localization annotation: CTP_CleavageSite=62; ConfidenceScore=5.27e-01
MSSSPSSMNRRPPGPLALGLESLAKKKTHSKKLTVKPHPDPVVALQWSNMERLVSSFGSSSRCSSSGSGAIFAKWTQGTYAPQDCTTRGIGNAGIAPAGCGWPFFDHAIGINVPRSRFLPVKATSDLQLVQSDLYTLVDGFVTRNSARTNPSNPSIELGPEFKKVGSFLGRFKSIPSIVELDILKVSGDVWFGSGIVLK

SEQ ID NO: 78618 - protein, 455 aa, Zea mays
  Coding DNA Sequence Number=SeqID_36839
  Gene Ontology: Mol. function=binding
  Homolog annotation: Hit_ID=Q9ASI0; Match level="QueryCoverage=44%, HitCoverage=62%, E-value=9e-57, Identity=56%"; Hit description =Putative arm repeat-containing protein
  Pfam annotation: Domain name=Arm; Domain location=100-140; Score =35.0; E_value=2.5e-07; Accession=PF00514.13; Description =Armadillobeta-catenin-like repeat
  Pfam annotation: Domain name=Arm; Domain location=141-181; Score =27.1; E_value=6.3e-05; Accession=PF00514.13; Description =Armadillobeta-catenin-like repeat
  Pfam annotation: Domain name=Arm; Domain location=205-246; Score=6.2; E_value=2; Accession=PF00514.13; Description=Armadillobeta-catenin -like repeat
  Pfam annotation: Domain name=Arm; Domain location=249-291; Score=5.3; E_value=2.7; Accession=PF00514.13; Description=Armadillobeta-catenin -like repeat
  Pfam module annotation: Pfam domain module=Arm::Arm::Arm::Arm; Domain location=100-140::141-181::205-246::249-291
  Subcellular localization annotation: CTP_CleavageSite=51; ConfidenceScore=5.62e-01
MDGGNTLPTTPASQPSSTILSQAGQGSGVTQNKGAAFIREPSLTPESRKVSSSAKTPSGAHNTPGANTLRLLPLELSNSQDDAYSVLDGSTNKTDKSVTGKRNKTKIVDAGALEPLLGYLRSSDPNLQEYATAALLTLSASSTTKPVIGASGAIPLLVEVLKGGNPQAKNDAVMALYNLSTIADNLQAILSAQPTPPFNRATEGWQECRVALTSEEGGVLAVVEVLEEGSLQGREHAVGALLTMCESDRSRYRDLILNEGAIPGLLELTVHGTPKSRMKAHVLLDLQLLSSAFNHCRAPEGAPNVLYPGKEKREGRKQHNIEENIHLPRKPPARCTLHAAAPHFSPSGAFSILAAEDVVPCVASSADARSSNKDWIWLFVPPPPPPVLPLPLPILLVRSGKLKLRSSQPRSTNFSRDLAYPPGSRNRVRLPDGGGESGCRRGNRRRRLLQRAEAD

SEQ ID NO: 78619 - protein, 428 aa, Zea mays
  Coding DNA Sequence Number=SeqID_36840
  Gene Ontology: Mol. function=helicase activity; Cellular component =nucleus; Biological process=RNA-dependent DNA replication
  Homolog annotation: Hit_ID=Q5JMT3; Match level="QueryCoverage=86%, HitCoverage=62%, E-value=7e-85, Identity=42%"; Hit description=DNA binding protein-like
MGDILIPSLMVGDCSHSLRLLHTDLVLLDEEGNSIHAQVYPPLCQQFSALLDDGGVYNLKYFLVRKANRFYKPVENCNMISFTKWTTVDVVLQIPLAFPVCTYNLTPIEQLQPHVDYKEYFTDVLGVVSVVSHVSSLRTRGRQAEVMKRTVTISNARDIGPTVDVVLWGERATAFLAKQIHRDSGSSPQIIIFVGTLVRSYADNVSLSGGSSCKWYINAPVPEVNALRTSAETNHHPVIWDQGKAAAEGTVIAVPEHKKLKDIKYLHPFENKKKEWLVIVKILKIDRSWWYNACKKCLRTTKPHGDTYKCTNSSCDSIGSPTPRYKISLTAEDDTDTAEFIFFGRMAQRLIKKNVDTLISTNPPDFIPKEITNLLEKYFEWNVSFTESTIIYGNVSFQVNAINAEMDGGNILPTTPSSQPSSTILSQG

SEQ ID NO: 78620 - protein, 1029 aa, Zea mays
  Coding DNA Sequence Number=SeqID_36841
  Gene Ontology: Mol. function=helicase activity; Biological process =viral genome replication
  Homolog annotation: Hit_ID=Q6YTQ6; Match level="QueryCoverage=84%, HitCoverage=64%, E-value=1e-165, Identity=59%"; Hit description =Helicase-like protein
  Pfam annotation: Domain name=DUF889; Domain location=806-1026; Score =14.0; E_value=1.9e-12; Accession=PF05970.5; Description=Eukaryotic protein of unknown function (DUF889)
  Subcellular localization annotation: CTP_CleavageSite=31; ConfidenceScore=5.32e-01
MNTIDQPSSSTPAHATRYAIPFHSQRERVKSVSAVAQRRLVYNLCCRGDPEVARLLLNMLDEHNKLVAAFRFAKERLDEEGNQKVTLRLLGCNTRHDAQYNLPANGELAAVIVGDCSSSQYKYDVLVQAREGGLKHVSCLHPSYMALQYPLLFPYGDRGYHLGIKYSDVGGGDASCRKYVTMLEFVRHRSHYRLNEPNPLAVDAYYGRLSNQLAVDAYSTIEASRLQFIADHQKELRCESVQGITDAIGRGLTSADSVGGRVIVPASFTGGRRYHVMNYQDAMAICRVYGPPDLFVTFTCNPKWKEIVDALRFEPGQQPCDRSDIVVRVFHMKVDEFIADIRENKVFGPIRAGPQIAPPNEIREYIDARYLSTCEALWRIFEFDIHFRVPSVERLAVHLPAKNIVRYEPGADLQTLLLSRAAKKTMLTEWFETNSKYSDARHLPYCDFPKEWSWDSSVRCWRRRRSSSTKIGRMYYVHPTAGELYYLRVLLMFVSGATSFVDIRTFQNTVYETFREACEARGLLEGDNEWNLLFDEAIVSASASQLHQLFVTIVVHCPVCNIRALFDKYWIYFTDDIHRGLKEALGNPHYTAPHEQLLMLLSRKLADTFANSGANIADYELPILPARGDEVFGNRLIDDELSPGPLLLCDHAATAAVSQLNADQRFIFEMLIESALSCSPGLFFVCGHGGTGKTFLWNAILTHLRSRQKIVLVVASSGVASLLLPKGRTAHSRFKIPFDLHESSVCGVKRGTMLSELIQRTSLVIWDEAPMTHRHCFEALDRTMRDILSEHKAENANIPFGGKPIVLGGDFRQILPVVRKGSRAAIVNASITSSPLWQHATVLKLRRNMRLSNPSLHGKEPANMEQFSKWVLDIGDGALPAVTRGDESEPTWVTIPEDLLIHTDGDAVASLISEMGDILIPSLMVGDCSHSLCVRVSRLWEFLHPQDDSRLLHTDLVLLDEEGNSIHAQIYPLLCQQFSALLDEGGIPPAFPVCTYNLTPIEQLQPRVDYKEYFTGNLLGIVVYMLQVT

SEQ ID NO: 78621 - protein, 69 aa, Zea mays
  Coding DNA Sequence Number=SeqID_36842
MARVTRTLLATDRLKGVVYSRVARTCSCSGGSVGIVDIKHILESLFFSRVIVFVLLLMVLSAGGLGLLI

SEQ ID NO: 78622 - protein, 69 aa, Zea mays
  Coding DNA Sequence Number=SeqID_36843
MARVARTLLATDRLKGVVYSRVVRTCSCSGGSVGIVDIKHTLESLFLSRVIVFVLLLMVLSAGGLGLLI

SEQ ID NO: 78623 - protein, 69 aa, Zea mays
  Coding DNA Sequence Number=SeqID_36844
MARVARTLLATDRLKGVVYSRVARTCSCSGGSVGIVDIKHTLESLFLSRVIVFVLLLMVLSAGGLGLLI

SEQ ID NO: 78624 - protein, 69 aa, Zea mays
  Coding DNA Sequence Number=SeqID_36845
MARVARTLLATDRLKGVVYSRVARTCSCSGGSVGIVDIKHILESLFLSRVIVFVLLLMVLSAGGLGLPI

SEQ ID NO: 78625 - protein, 69 aa, Zea mays
  Coding DNA Sequence Number=SeqID_36846
MARVARTLLATDRLKGVVYSRVARTCSCSGGSVGIVDIKHILESLFFSRVIVFVLLLMVLSAGGLGLLI

SEQ ID NO: 78626 - protein, 609 aa, Zea mays
  Coding DNA Sequence Number=SeqID_36847
  Gene Ontology: Mol. function=intramolecular transferase activity, phosphotransferases; Cellular component=cytoplasm; Biological process=carbohydrate metabolic process
  Homolog annotation: Hit_ID=P93804; Match level="QueryCoverage=99%, HitCoverage=100%, E-value=0.0, Identity=87%"; Hit description =Phosphoglucomutase, cytoplasmic 1
  Pfam annotation: Domain name=PGM_PMM_I; Domain location=16-211; Score= 138.6; E_value=1.7e-38; Accession=PF02878.6; Description =Phosphoglucomutasephosphomannomutase, alphabetaalpha domain I
  Pfam annotation: Domain name=PGM_PMM_II; Domain location=245-340; Score=63.4; E_value=7.2e-16; Accession=PF02879.6; Description =Phosphoglucomutasephosphomannomutase, alphabetaalpha domain II
  Pfam annotation: Domain name=PGM_PMM_III; Domain location=342-466; Score=130.3; E_value=5.5e-36; Accession=PF02880.6; Description =Phosphoglucomutasephosphomannomutase, alphabetaalpha domain III
  Pfam annotation: Domain name=PGM_PMM_IV; Domain location=504-598; Score=95.9; E_value=1.2e-25; Accession=PF00408.10; Description =Phosphoglucomutasephosphomannomutase
  Pfam module annotation: Pfam domain module=PGM_PMM_I::PGM_PMM_II::PGM_ PMM_III::PGM_PMM_IV; Domain location=16-211::245-340::342-466::504-598
  Subcellular localization annotation: CTP_CleavageSite=47; ConfidenceScore=5.44e-01
MGLFTVTKKATTPFEGQKPGTSGLRKKVPFPTFPYLSPDLRAPVRISLFLRRGGFVLDSAPLCKFCARLKLLEVTVFQQPHYLQNFVQSTFNALPADQVKGATIVVSGDGRYFSKDAVQIITKMAAANGVRRVWVGQNSLMSTPAVSAVIRERIGADGSKATGAFILTASHNPGGPTEDFGIKYNMGNGGPAPESVTDKIFSNTTTISEYLISEDLPDVDISVVGVTSFSGPEGPFDVDVFDSSVNYIKLMNYDALHGVAGAYAKHIFVEELGADESSLLNCVPKEDFGGGHPDPNLTYAKELVERMGLGKSSSNVEPPEFGAAADGDADRNMILGKRFFVTPSDSVAIIAANAVQSIPYFASGLKGVARSMPTSAALDVVAKNLNLKFFEVPTGWKFFGNLMDAGMCSICGEESFGTGSDHIREKDGIWAVLAWLSIIAFKNKDNLGGDKLVTVEDIVRQHWATYGRHYYTRYDYENVDAGAAKELMANLVSMQSSLSDVNKLIKEIRSDVSEVVAADEFEYKDPVDGSVSKHQGIRYLFGDGSRLVFRLSGTGSVGATIRVYIEQYEKDSSKTGRDSQEALAPLVDVALKLSKMQEYTGRSAPTVIT

SEQ ID NO: 78627 - protein, 282 aa, Zea mays
  Coding DNA Sequence Number=SeqID_36848
  Homolog annotation: Hit_ID=Q10N52; Match level="QueryCoverage=29%, HitCoverage=7%, E-value=3e-12, Identity=50%"; Hit description =Expressed protein
MAPLLSLATPLTPPPPHHHHGTERLGDLLDHGWVRPDRQFTAAVFDDVVLLWEGDDEPTGAVRARRMGPRGGQTELPDSTPLPPARIAPALPSLPPDAPTRNRATPKANVSWLQRWAPYDLDPSHPMAALAPIPFPTKSIDRIVHRLCNLALSPEVDKFVKHGIHKCHPQSCCRNRKCQPTVSTVCKPTAGHIRADEDTRQRSCDTNESCGALPSSSNPTVEPLPSNSLGNAIVDGMSQGSAEMDCSDDDVNTVSRIPTTSGARASCESLPVLEESFSYCSM

SEQ ID NO: 78628 - protein, 57 aa, Zea mays
  Coding DNA Sequence Number=SeqID_36849
MGTNGHLDLDTGGKSVDQKMKDMYREALWQKRGRPRELYPDVSSKDAPVPPELPVPT

SEQ ID NO: 78629 - protein, 167 aa, Zea mays
  Coding DNA Sequence Number=SeqID_36850
MRNLGDEPEKKKRREKRQGNEAKMKDMYREALWQKRGRPRELYPDVSSKDAPVPPELPVPNCDCGRLAWGHERCFFFQWIDGPDKFDPRYLLFVNWLSGKTSHERFKRWVPPPPNPPPMTDEEKEVATERRMDSPPRCDCGDRAVIDEDYDKQFCCPNIDYVSPLIR

SEQ ID NO: 78630 - protein, 433 aa, Zea mays
  Coding DNA Sequence Number=SeqID_36851
MYREALWQKRGRPRELYPDVSSKDAPVPPELPVPNCDCGRLTWGHERCFFFQWIDGPDKFDPRYLLFVNWLSGKTSHERFKRWVPPPPNPPPMTDEEKEVATERRMDSPPRCDCGDRAVIDEDYDKQFCCPNIDYPYGWRKCRFREWLYGPLSHWPEPEVKEKRYMGWAAEEVKFDPVLCKCGIEAKYGLVPSELGVGYFCGHMVDYDEETRKCSWESYDDKGEVMRTIESKRIMGQKMRCGSRLVDSYINDRIRDMRREAKTAFYDSPKRAEYRRLKAADEKRAQDAREWEAAQAEKQMLDNLADRLKGKIGSGVNYLADEAHARYVQDKMATVELMEEEDDDTCRLSELIALAEAGLHEEEEDDTSRLSELIALAEAGLRAQEEEDEFMSQAAAEVEAAYYKKKVDEAEAEDELFSQVADEAEANYYKKNW

SEQ ID NO: 78631 - protein, 107 aa, Zea mays
  Coding DNA Sequence Number=SeqID_36852
MAGERLLQGSSAMAADGDGSRRPWEGKAPARHGQKKGGRKGAVPATRVPSAMAGRGEEGDELSSLCAAVWEDCCAREKKTGRRVAARRIRGVGMENFQICKGEGSYL

SEQ ID NO: 78632 - protein, 204 aa, Zea mays
  Coding DNA Sequence Number=SeqID_36853
MGDGDSLRVPFGGEDGEEMEQQRCAWMLLGAGQGNRGRLAMEERSCCVAMDLDLTEVSPRSYSAQGERLPAAARRRKQGRPWRNAGRESGLGVHGCWSFCPCAHQAGKEENGASAALLQGASAREEGAMVGSACSKGARPWRLMEMEAVGHGREKLLLAMDRNREGGRALSLLQGCRAPWQLPWDACCAMEKKTGRLLRRLEKK

SEQ ID NO: 78633 - protein, 164 aa, Zea mays
  Coding DNA Sequence Number=SeqID_36854
MEERSCCVAMDLDLTEVSPRSYSAQGERLPAAARRRKQGRPWRNAGRASGLGVHGCWSFCPCAHQAGKEENGASAALLQGASAREEGAMVGSACSKGARPWRLMEMEAVGHGREKLLLAMDRNREGGRALSLLQGCRAPWQLPWDACCAMEKKTGRLLRRLEKK

SEQ ID NO: 78634 - protein, 372 aa, Zea mays
  Coding DNA Sequence Number=SeqID_36855
MHRIPPPSEPPDGERPCCLRLVVGGAQPYGGGHASAIARLQGFSSGSPAAFPHRWSPRMVTTSSMVGRSKPGCSLCPALSFKDLHHPCCGGGQAEPGFHLQHGPVGHLLLQHSGERVLIGLAEGADFGNAGPSGRKRRQLQRAWLAGSAGSGAASGATSHCWGVAWLSAHRGAAVAPCAPEDRPGCRTPLGWRSCSWIVLSPLRHDASARRSMPARPGGLEWGSAVGEGFSADETVGATRGLRWLFGFDSLSSPLEWGRGRGPCRSSVCSEALRCGGCSYPQEWNQSSICNGTLSAGRRRSPSARSALPRKASIAQLNNPWLLCDEPEPEAAVSAWTEAESAREEASSAREHVASLAEEVQQRQLELGQVVR

SEQ ID NO: 78635 - protein, 111 aa, Zea mays
  Coding DNA Sequence Number=SeqID_36856
MGSARVAFVLLLEERNLTEVDAIVGAEVVATGEGFSADETVGATRRLTSGSLALIACPFPSSGDVGEGLVAVASALRSSLLLFSRPERRSLSLLMEQSAASHPEFVVPRAL

SEQ ID NO: 78636 - protein, 328 aa, Zea mays
  Coding DNA Sequence Number=SeqID_36857
MMKILEAEGGAEAAARLASPHHRASGHHLGVPTSVRLRSSNNKTKATQALPIRGLGRWKDAMHEGSAKTWLPPGGRSLFKDGSPHSRPQASWTKSSLTYPRVLPLRHGGWVPRVMQSWPGTEEAKPPRVERVTAPRLQALLHPRRNQRLKGQTAMQAACNRTTETHPFNFDASSVEAQAHTSCNRCAGYYVRKTAPPLAPIPCLLDCGTGAATRGNPAHGPTVPTEHIGHGSVSRGRRRDGRYGQKWAGSNGGSRRAEAAVKSSAGSRPLLEQQGSPLPRREDDAPVFRPSNGSHNGCPANHLSRRINFAAGQATPLAGEAGDVSPPP

SEQ ID NO: 78637 - protein, 88 aa, Zea mays
  Coding DNA Sequence Number=SeqID_36858
MAEGEEAPTGSMAGGEVAPTRYMARVEAAAIPTRSTLEGEEVATGSMAGGEWAAAGSMVEEGKGIISSPMVKLIETFAVFCKSQFLFM

SEQ ID NO: 78638 - protein, 98 aa, Zea mays
  Coding DNA Sequence Number=SeqID_36859
MTWQGAPDCPVCTGLSGDFQKDMDIKSDEKATKFDTNVQPVDVKSNEKGAGVGIVEASHGKAHVVITNPLITVPIQLETPIVNRLDGNNGTSLNPPAG

SEQ ID NO: 78639 - protein, 548 aa, Zea mays
  Coding DNA Sequence Number=SeqID_36860
  Homolog annotation: Hit_ID=Q7XD58; Match level="QueryCoverage=33%, HitCoverage=18%, E-value=1e-08, Identity=27%"; Hit description=Ulp1 protease family, C-terminal catalytic domain containing protein
GIISSPMVKLIETFAVFCKSQRAAYREKVLIEAEKQFLHDFTFFKENLLVDFGQIVDVECIDSTCQVLCDKVRGCCSICKSRCTEAIIDSLKILAEAMTIKHQKFLNSNNLLAKDMDIKSDEKATKIDTNVQPVDVKSNEKGAGVGIVEASHGKAHVVITNPLITVPIQLETPIVNRLDGNNGTSLNPPAECAHPLNKPFHYSKTDKLGLFPRTKLFSPVGLFDLQITDDESDHNGRGRNTAAAICPGVPIGLGQLAPPIATHVVYGATSAAATGCVNNDVYSGVASVVLSQNPKAHAAGAFLAGNDTIYEPTLALNFSKLNSTERHRNSGGISGKKEEVIVIADDVGADQEVQTVVVNMVGANLHGSSRSKSATAVDQMYNDMNIFNVESEAGGFFLGNQLEVGNVVRNDVGENWLQVQNAHARFPCSNVLLRCYNILCGMGRSQWKDLVAVRFSKTTTVNWESFGLSIEPNGHCDNFFIAGFCRKHFEDIHPRLSKKHFFYPKVGHSMMEYNSQYEVEDLRKSFLGANSSLKLHRSNKVFCLLSLL

SEQ ID NO: 78640 - protein, 280 aa, Zea mays
  Coding DNA Sequence Number=SeqID_36861
MEPVVLNRERAAADRLKRMPMLFDDYREEDFYGLPRKYSIVARVEVKFPKEPRFRDRQHFVLSDINGSKIEAITYMYETVKHFDNLLHEKHVYKMHNVKFSLHPGEFNFRHLNGPMELCLDQQTIVEPYTVPIQMAPFPKQILLNLADIAELPNRTLVDIMAVVVHLDTIQRTMWGPFRKIVIMDARGYLHIIKVWGDLLNKNALRWALAKEDYGIIIGTMFRRFRRQECLESSDHTTIHFNPFHHNTHHFGHVINCGIHCSNPKSFGGAEQPSVCCDIS

SEQ ID NO: 78641 - protein, 488 aa, Zea mays
  Coding DNA Sequence Number=SeqID_36862
MEPVVLNRERAAADRLKRMPMLFDDYREEDFYGLPRKYSIVARVEVKFPKEPRFRDRQHFVLSDINGAKIEAITYMYETVKHFDNLLHEKHVYKMHNVKFSLHPGEFNFRHLNGPMELCLDQQTIVEPYTVPIQMAPFPKQILLNLADIAELPNRTLVDIMAVVVHLDTIQRTMWGPFRKIVIMNARGYLHIIKVWGDLLNKNALRWALAKEDYGIIIETMFRRFRRQECLESSDHTAIHFNPFHHSTHHFGHDSKGGKIRCNSRNKKVTLQTTDVTQETKRSENQGFFMENGEPTETDQMEHNDGRTPLTNISNTITIADENGSKRLGPNVDAKELSLSDGYSTIDFTNFATQVPNVNRDDDSDWLHRNETFKSDNVFTTRDLLTPGGVHETVGNTPNHNLGRAAYFRERYKNLTPAERELNRERLRLYNNTPKRKGSKIEYISRALLADTLSQESIAMESPTYTPEVVHPTTDAIEPNGSALTPCD

SEQ ID NO: 78642 - protein, 2184 aa, Zea mays
  Coding DNA Sequence Number=SeqID_36863
  Gene Ontology: Mol. function=helicase activity; Biological process =viral genome replication
  Homolog annotation: Hit_ID=Q1EPC6; Match level="QueryCoverage=71%, HitCoverage=99%, E-value=0.0, Identity=65%"; Hit description=DNA helicase homolog, putative
  Pfam annotation: Domain name=DUF889; Domain location=1240-1476; Score= 461.5; E_value=1.1e-135; Accession=PF05970.5; Description=Eukaryotic protein of unknown function (DUF889)
  Pfam annotation: Domain name=Peptidase_C48; Domain location=1587 -1808; Score=44.7; E_value=3.1e-10; Accession=PF02902.9; Description =Ulp1 protease family, C-terminal catalytic domain
  Pfam module annotation: Pfam domain module=DUF889::Peptidase_C48; Domain location=1240-1476::1587-1808
MESPTYTPEVVHPTTDAIEPNGSALTPCDWVIPDIASNPFLPASTQTEDADSLRMSTRPLRRKQHVPRGERQAILARRNRQFEASISRNMATVAEDIISDAEEGDDRTQPHMTAKINNNGNYYHFYPPFYPECPVDDDDGVVFEDDADENEGYLFAGQYEDTDEDIEIDGSQDESSAIDVPDPYDKVYSNIPKETHMLKTVPNCGYCTAKKFEYETPGFCCRGGKVELAPLETPPQLKRLWDSADSDARHFRDNIRFFNGHFSFTSLYCCLDSMTTNVRDSGIYTFRAQGMMYHNIKSFGRDGGAEHKHLELYFYDDDPTLEHRYRKCREEHQQKDKEVIRQIVDILRGNPYSEHLRTMGHVENLDDYRIALNLDQTLNQKTYNTPLTSEVAAVWIEGSKGRGQFSKSVMLHGKDSSSHCIRSYHGCYDALSYPLFFPRGELGWHGNIPKVGVSMDEVDAYRATHRASNANDENAAEEIRPGVFNPILHGKRLFQQFAVDTYIKIENSRLDYIRKNQDRLRADLYQGLVDSMLDGDIRGEKVGKRTVLSTSFIGGPRDMRRRYMDAMALVRKFGKPDIFLTMTCNPNWDEIRRELLPGQTPQDRADLVVCVFHAKLQELKHRLTKQDILGKVRAYVYVVEFQKRGLPHAHFLLIMQRKYKLTCPEQYDLLISAEIPSNKYPELRKMVIKHMMHGPCGSLNPNCPCTKGRKSCKNHYPRPFSDTTLQGKDSYPIYRRRDDDRKEKVRGCELDNRWVVPYNPYLLRLFNCHINVEACGSIKAVKYLFKYIYKGHDRASVVMRDASKADDDVDEIKQYRDARWVTPPEALWRIYGFELSQISPPVMQLQLHLPNMHMVAFHERQMVERVVNRPGVDRSMLTSYFEANRFNKEARGILYRDFPEWYTWQSGKGKVWQRRKRDTGGQVGRIVSAHPAEGERYYLRVLLNHVTGAASYVDLRTVDGVTLPTFHEAAERRGLLESDNTLDECLTERALFQMPSSLRRLFATILVYCEPSDVAVLWQKHKDSMSEDYQHKSQNKTHVEQMVLIDIRNMLQSMGKDIKTFPLPPMIDAYDDAIGTAREVYEEESIQPTVEDVALKDSLNEEQRAAYDKIMSAVDTDQGGLFFVDGPGGTGKTYLYRVLLATLRNQGKIAVATATSGVAASIMPGGRTAHSRFKIPLTIDDGAVCSFTKQSGTTELLRKASLIIWDEASMTKRQAVEALDNSMRDIMGRPALPFGGKTIVFGGDFRQVLPVVRKGSRAQVVASSLRMSYLWESMSHLKLVSNMRAKNDPWFAEFLLRVGGGTEETNSDGDIRLPDDVCVPYSGSDNDLDNLIDFAFPNLNENMSDSTYITSRAILSTRNDWVDMINVKMIDRFQGEHMVYHSFDSAVDDPHNYYPPEFLNTLTPNGLPPHVLKLKIGCPVILLRNIDPANGLCNGTRLVVRGFQRNSIDAEIVLGQHVGKRIFLPRIPLCPSDEEMFPFQFKRKQFPVRLSFAMTVNKAQGQTIPNVGVYLPEPVFSHGQLYVALSRATARSNIKILVIPAVDGRKKLRKGVKKTPTVDCGTYTKNIVYKEEIPCEPRVEVVLIDDAFVERKWMECLFQPSAYLGDEVIDCYINLIKAQKHLKCRSGGRVYIENAFQFNFLKRDGDLEIKTEELYPIKDMTHICSAERRVLLYLDHDMVFIPINIRETHWYLAVIHARNMEIQVLDSLGTSQDRKDLTDSIKGLQRQIDMISQRKELKDHRWPDLQVASWPLREIDMGYAKQTDSSSCGLFLLNYIEYWTGDELSDSFTQDGMSHFRKKMAAILLSSDLNKRRGCLLYKNEKEVDSGSPSDVEILENPTDSNKRKLLHVLDDSEVVFEDEEGPITQADLQRWFVDDWDKRAPVKVSNDGCTNDFLMVGLSTKDMPVTKADSIDVLCDYIMAIEDDTTLERTWVRSFNPFKIEISVKDLQNILTTTQDMILRCFDMAVRLLANKESRKPKEEIINNRKHYMDMRFWRMVGFGKIPKYHQDPTTEELAKTLDCWPSMNYYITGCRYVLMPWKFNGCHALFVIDHVKKHVTFIDFTPTQDWCKHMPYKRFAEAIIMASKKYKIAYSKKRSGWTEDIFKWEHTIQTGVPIDLRGFNTSYLVLQAMAMWGNDRRLKFVGDAKTLRRNFVIDLLSYEDNSCRYAIPANIQQRLVDIARKD

SEQ ID NO: 78643 - protein, 95 aa, Zea mays
  Coding DNA Sequence Number=SeqID_36864
  Subcellular localization annotation: CTP_CleavageSite=63; ConfidenceScore=5.47e-01
MARHSVPTHINRPHRFPVSRSGLTALAYNASLTPTGRRAVTALVPTITGMGDLVSGRVRGYVHCQVHSGSITLCKKKTKLRNNLGFLGHTGLLVG

SEQ ID NO: 78644 - protein, 95 aa, Zea mays
  Coding DNA Sequence Number=SeqID_36865
  Subcellular localization annotation: CTP_CleavageSite=54; ConfidenceScore=5.45e-01
MARHSVPTHINRPHRFPVSRSGLTALAYNASLTPTGRRAVTALVPTITGMGDLVSGRVRGYVHCQVHLGSITLCKKKTKLRNNLGFLGHTGLLVG

SEQ ID NO: 78645 - protein, 95 aa, Zea mays
  Coding DNA Sequence Number=SeqID_36866
  Subcellular localization annotation: CTP_CleavageSite=63; ConfidenceScore=5.45e-01
MARHSVPTHINRPHRFPVSRSGLTALAYNASLTPTGRRAVTALVPTITGMGDLVSGRVRGYVHCQVHSGLITLCKKKTKLRNNLGFLGHTGLLVG

SEQ ID NO: 78646 - protein, 95 aa, Zea mays
  Coding DNA Sequence Number=SeqID_36867
  Subcellular localization annotation: CTP_CleavageSite=54; ConfidenceScore=5.40e-01
MARHSVPTHINRPHRFPVSRSGLTALAYNASLTPTGRRAVTALVPTITGMGDLVLGRVRGYVHCQVHSGLITLCKKKTKLRNNLGFLGHTGLLVG

SEQ ID NO: 78647 - protein, 95 aa, Zea mays
  Coding DNA Sequence Number=SeqID_36868
  Subcellular localization annotation: CTP_CleavageSite=55; ConfidenceScore=5.44e-01
MARHFVPTHINRPHRFPVSRSGLTALAYNASLTPTGRRAVTALVPTITGMGDLVSGRMRGYVHCQVHSGLITLCKKKTKLRNNLGFLGHTGLLVG

SEQ ID NO: 78648 - protein, 418 aa, Zea mays
  Coding DNA Sequence Number=SeqID_36869
  Gene Ontology: Mol. function=protein serine/threonine kinase activity; Biological process=protein amino acid phosphorylation
  Homolog annotation: Hit_ID=Q1SDD6; Match level="QueryCoverage=73%, HitCoverage=90%, E-value=5e-70, Identity=43%"; Hit description =Protein kinase
  Subcellular localization annotation: CTP_CleavageSite=53; ConfidenceScore=5.64e-01
MQSVAEMASNAYRKPSVSPSATMLKALPMRFLASPEPGGWSRRLPRRSLRSVSAALMTNPAYFEVGRFLGGYGFMNITSYSSSQFGEPSNVAGIQDLGLGYSPEEIERLRVQDIGEGEVTIRLYEGRVVQGPFRGTRAVFKVYPGARADASEADLMALNELRTHAFLQSDASDICENIQFLLGAFETATGEQWLAFRDDGRYSAADYANVTSARQLKEKSGGTPFWNPFDRAYKLELRRYFVLKLLNGAMSGLVHMHNHDRLHQSLGPSSVILKYSSIGAGVLSDGLWRRASAAGASTPLEKRAFGIADDMQMISHDIQTHMLINFQISYRYCLADDQLSEAAMLNPDYRKRPIAEAVLNHRFWIMISLIITILIDYEKNKYIGDETRRQSPEGKYLYHFELEALMPVRNDFGASKDL

SEQ ID NO: 78649 - protein, 67 aa, Zea mays
  Coding DNA Sequence Number=SeqID_36870
MRNLHQPTTSSVGLRLKQLPNMHAKVPDRDGNGYPKPETRFWIMISLIITILIDYEKNKYIGDETRG

SEQ ID NO: 78650 - protein, 419 aa, Zea mays
  Coding DNA Sequence Number=SeqID_36871
  Gene Ontology: Mol. function=glutamyl-tRNA reductase activity; Biological process=tetrapyrrole biosynthetic process
  Homolog annotation: Hit_ID=Q2QM36; Match level="QueryCoverage=76%, HitCoverage=88%, E-value=1e-125, Identity=70%"; Hit description =Expressed protein
  Pfam annotation: Domain name=DUF266; Domain location=180-300; Score =139.0; E_value=1.3e-38; Accession=PF03267.4; Description=Arabidopsis protein of unknown function, DUF266
MISLIITILIDYEKNKYIGDETHGFGTAKPSGFIPVAISISDTSLLDRSRKAEEQQGEMAPPYVLSLLLLLVLSVPAVFLVAPRLIPPRALPAIPDADETEDLALFRRAVLLSAAPSSKAGAGPASPSRFFGAAHRRQRKQKVAFLFLTNSDLVFAPLWERFFAGHHGLLNVYVHADPAAAFALPPTPSFRGRVIRGKATQRASATLISAARRLLATALLDDPANHFFAMLSQSCVPLRPFPALYRTLTADTAGPRGRHRSFIEILDAEPTLHDRYYARGDDAMLPEVPYESFRVGSQFFVLTRRHAVMVVRDRRLWNKFKLPCLVKRKHSCYPEEHYFPTLLDMQDPAGCTKFTLTRVNWTDSFDGHPHTYQPEEVSPELIRDLRKSNGTYSHMFARKFAPGCLAPLMEIADSVILRD

SEQ ID NO: 78651 - protein, 383 aa, Zea mays
  Coding DNA Sequence Number=SeqID_36872
  Gene Ontology: Mol. function=protein disulfide isomerase activity; Cellular component=endoplasmic reticulum; Biological process=cell redox homeostasis
  Homolog annotation: Hit_ID=Q5EUD6; Match level="QueryCoverage=45%, HitCoverage=78%, E-value=6e-91, Identity=74%"; Hit description =Protein disulfide isomerase
  Pfam annotation: Domain name=ERp29; Domain location=326-383; Score= -4.4; E_value=0.0014; Accession=PF07749.3; Description=Endoplasmic reticulum protein ERp29,
  Pfam annotation: Domain name=Thioredoxin; Domain location=204-310; Score=185.6; E_value=1.2e-52; Accession=PF00085.10; Description =Thioredoxin
  Pfam module annotation: Pfam domain module=ERp29::Thioredoxin; Domain location=326-383::204-310
MGKQSQYFHKWYFVMTTPTSRRKSATHFMVRYEEHDFLEKSGVYAVEFSDVFHIYNDLALDISLHRSWMLCMRKIDKYRGIVGFLDPEMIILNRINEEADEVEAYIVKALLAQQDKECIFVVCQEGAFGAYVDKKGRHNKNFGRTVIWKHFQGRAGFATCPLLPDEIENVRERLLDFFMNEVIDIGGSCRVDGTNVKIAAIPSSVVVLTSETFDSIVLDETKDVLVEFYAPWCGHYKHLAPIYEKLASVFKQDDGIVIANLDADKHTDLAEKYGVSGFPTLKFYPKGNKAGEDYDGGRDLDDFVKFINEKCGTSWDTKGHLTSEAGLVPSLNPLVKEFLNAADDKRKEVLSKIEEDVAKLSGSAAKYFLPPSPTLCLQATRLI

SEQ ID NO: 78652 - protein, 80 aa, Zea mays
  Coding DNA Sequence Number=SeqID_36873
MAASVVTAPFAVVLIHLHGLGFEQEQMKEHALHLLVLSHVFSVPSLKTLARLCDAPRLALARVRMVIGDFKTISLTDGGK

SEQ ID NO: 78653 - protein, 287 aa, Zea mays
  Coding DNA Sequence Number=SeqID_36874
  Gene Ontology: Mol. function=isomerase activity; Cellular component =endoplasmic reticulum; Biological process=cell redox homeostasis
  Homolog annotation: Hit_ID=Q5EUD6; Match level="QueryCoverage=50%, HitCoverage=72%, E-value=3e-68, Identity=69%"; Hit description =Protein disulfide isomerase
  Pfam annotation: Domain name=ERp29; Domain location=114-175; Score =3.6; E_value=0.00021; Accession=PF07749.3; Description=Endoplasmic reticulum protein ERp29,
  Pfam annotation: Domain name=Thioredoxin; Domain location=1-98; Score= 88.3; E_value=2.4e-23; Accession=PF00085.10; Description=Thioredoxin
  Pfam module annotation: Pfam domain module=ERp29::Thioredoxin; Domain location=114-175::1-98
PIKCYLLKNRLLSTDAHWFRCGHYKHLAPIYEKLASVFKQDDGIVIANLDADKHTDLAEKYGVSGFPTLKFYPKGNKAGEDYDGGRDLDDFVKFINEKCGTSWDTKGHLTSEAGLVPSLNPLVKEFLNAADDKRKEVLSKIEEDVAKLSGSAAKFEQEQMKEHALHLLVLSHVFSVPSLKTVCVDQLERGFLAPDNVVDMLQLARLCDAPRLALACVRMVIGDFKTISLTDGWKVMRRANPSMEQELLESLVEADTVTPNLYGNLVANTTACIVGGMGIMPGGRDCS

SEQ ID NO: 78654 - protein, 128 aa, Zea mays
  Coding DNA Sequence Number=SeqID_36875
  Gene Ontology: Mol. function=transcription cofactor activity; Cellular component=nucleus; Biological process=regulation of transcription, DNA-dependent
  Homolog annotation: Hit_ID=Q5JLW2; Match level="QueryCoverage=59%, HitCoverage=18%, E-value=3e-27, Identity=72%"; Hit description =Putative BTB and TAZ domain protein
MKEHALHLLVLSHVFSVPSLKTVCVDQLERGFLAPDNVVDMLQLARLCDAPRLALACVRMVIGDFKTISLTDGWKVMRRANPSMEQELLESLVEADTVTPNLYGNLVANTTACIVGGMGIMPGGRDCS

SEQ ID NO: 78655 - protein, 217 aa, Zea mays
  Coding DNA Sequence Number=SeqID_36876
MRLILRYLFLTCGGRWYPLPTSHVTHLPRDRDFPYTSTEEARQGFLPDRHRSKINQGPPYTDHSPTALAPFGYQDDLQVTRVLAAKRSNTDKHVALSCCYLKIRQRVALHRREALLHAARSRGQRTEASAALVLSAIPAFAYKQRTEASADIVFLVPGPRGGARGLADGVLLPDRLVHRQPDGGRAPGWPWDGLVGPRPCASREQINAEQKRGREQI

SEQ ID NO: 78656 - protein, 117 aa, Zea mays
  Coding DNA Sequence Number=SeqID_36877
MAERAQNEVTGLPEKRRKGRRKRNGQRDLALCPALSVPPLWVEADEAMQLKTQDLNDAIVTPKVCSMKCLQHSEVSICESLQAKTNDSYSRSKRLLNIKHQQQPLEQLKMLYWKLSQ

SEQ ID NO: 78657 - protein, 130 aa, Zea mays
  Coding DNA Sequence Number=SeqID_36878
  Subcellular localization annotation: CTP_CleavageSite=33; ConfidenceScore=5.28e-01
MVARAPLWQASVAGLAGRWSTTWSSSSTMYSVMRDAKMQLKTQDLNDTIVTPKVCSMKCLQHPEVSICESLQAKLFKELEAAQHKASTATSGTAENALLEAKSVTDLKSKDLEKKKSELCSLIQEVGVLL

SEQ ID NO: 78658 - protein, 153 aa, Zea mays
  Coding DNA Sequence Number=SeqID_36879
MKEDLVGLQHFNYKLAQREPKSSFEEASMQLKTQDLNDAIVTPKVCSMKCLQHPEVSICESLQAKTNCFTMNPASNSGMISSADAGDKLKLRVLCFLKLEAGGLNQTTSHESIAFNNHLCQDRQLKKRIDLFYGRSVEDGFGEGNILLVHQVL

SEQ ID NO: 78659 - protein, 131 aa, Zea mays
  Coding DNA Sequence Number=SeqID_36880
MKQSWCCGRGKSQFLAGVVTPPQIRAVPWPRLLAARGHRQGVAGDPLKHAVTVSGLAGEGRWPGHGEFLAGLRPGLRICCPPWALIGGSPPALLFCYSIYVHVKIINVNWNIELNLRNTCHHKGLWTPLAD

SEQ ID NO: 78660 - protein, 64 aa, Zea mays
  Coding DNA Sequence Number=SeqID_36881
MACPGLLAGALGHGAAVRKLRPACARLFCYSIYVHVKIINVNWNIELNLRNTCHHKGLWTPLAD

SEQ ID NO: 78661 - protein, 73 aa, Zea mays
  Coding DNA Sequence Number=SeqID_36882
MESRSAAAGVSALQISVRPRSRLPVAIATFFSRIRLEQTPEPFHVKIINVKWNIELNLRNTCHHKGLWTPLAD

SEQ ID NO: 78662 - protein, 499 aa, Zea mays
  Coding DNA Sequence Number=SeqID_36883
GVAQVALSFCQTGQWSGGVTAVTSALPGARVRIELYADGGYQLRIRRLEAPEPLHRARGRSGTDSAFYIRPYVAFPQGGGGECAMLPSMGTEHGVSGELQAATGVPVARRVGLGSKLACQKSEKRVHLARLHAACMAARPFCPLVWAEMGGRLVGSSRLPSPRDGGYPPPFRLLVGGTQLHGSWYLSAIVRLQGFSSGSLVAPFRQWPPKTVTSSSWMGRDRPGCGPALSVGCVRHPRWGGGRGEPGLYLACGSANHLLFQLLVVAIVLPRYDGVVLQSCRGRRTVAVQLGRNILSSPSRSGRGRQRGSTGALGGGPLFGFDGLFASLEWDREQEPSGDCVHPGPWLPLQRSSPRRPEVAHTLGDGTGVPGNRLSRLLGPDSWRSPWTSAPPEAWSGFAVDVVDAEGATAPFGVKTRACRIRSSCSVRFLRPPRPEEHALVALAKLRLFSSCFEHLDSVGNRDKGTSEVSVSRRRRSPSARSALAAYVYLVVSRIRFPK

SEQ ID NO: 78663 - protein, 189 aa, Zea mays
  Coding DNA Sequence Number=SeqID_36884
MRKKHGSVPKSHTRSGLDSHNGQKHWHPRCHHKRDSGSVPEGMSDLGPAGRRPLQRQPWPRVNAVTGRLLFAVPLKGCEQAIKAKERAASKRSGTGEGGYPERDPSPRRNRAPSPPLLIRGSKAGPPRVQQPPQIAWARHPLLVRGSKANPPKGSMAASGYSGSAPITDQGFEGWPPKGSQSPQTPSEG

SEQ ID NO: 78664 - protein, 74 aa, Zea mays
  Coding DNA Sequence Number=SeqID_36885
MKVCAEGCFGQNVTKIKSEKKLKGGMHKGEASCRRDDEYCAPLGAGALFANRLVRRAVCWVTLTPSVGGLDRTH

SEQ ID NO: 78665 - protein, 126 aa, Zea mays
  Coding DNA Sequence Number=SeqID_36886
MELGGCHNNSLAADNAPGDALDGVRDACAAVCCRAACTSAVPGTGRLGTATGQARRLLGDPDVVCRRIGQNTLNAERARRPSAWWQAACPSRNKCKDCTTIWALRQVWPVGLRYGPQAMRSRRVSA

SEQ ID NO: 78666 - protein, 251 aa, Zea mays
  Coding DNA Sequence Number=SeqID_36887
MGRPKGTTWRGRMIRPRKHRWVRTSAEEHRTPVSTSPELPVETCRVPLSEVRALAGSRDGEDPDTSKGGVRVTQQTARLTSLLANSAPVPSDAQYPSPLPQEASPTYRLTSSSEAGPGATVGTLNQGYPLLQYEGAAPVRHLLVTRRAASDPHHMGRPKGTTWRGRMIRPRKHRWVRTSAEEHRTPVSTSPELPVETCRVPLSEVRALAGSRDGEDPDTSKGPVPTRVQALPYAPRSGRNPPRPRGLWPVT

SEQ ID NO: 78667 - protein, 74 aa, Zea mays
  Coding DNA Sequence Number=SeqID_36888
MERFQELRMEEKVKLHSILISCLTEDFNRRLSPFSQILNEVNNGTLISRVMRKMTQVDPKRGLLRMVMLMNEPA

SEQ ID NO: 78668 - protein, 96 aa, Zea mays
  Coding DNA Sequence Number=SeqID_36889
  Subcellular localization annotation: CTP_CleavageSite=74; ConfidenceScore=5.28e-01
MVAVHASWPWTVLAQATVVPREMHAFMVASAKFANVLLPVRLSSLLRALALAIPCSTSSLFFAQQGAIINHVMRKMTQVDPKRGLLRMVMLMNEPA

SEQ ID NO: 78669 - protein, 65 aa, Zea mays
  Coding DNA Sequence Number=SeqID_36890
  Subcellular localization annotation: CTP_CleavageSite=59; ConfidenceScore=5.63e-01
MALRRVAPLRVSFCSLAHSSRSFSSSAPAQSGLPGTLISRVMRKMTQVDPKHGLLRMVMLMNEPA

SEQ ID NO: 78670 - protein, 351 aa, Zea mays
  Coding DNA Sequence Number=SeqID_36891
  Homolog annotation: Hit_ID=Q84ZX8; Match level="QueryCoverage=33%, HitCoverage=29%, E-value=1e-43, Identity=75%"; Hit description =Sucrose-phosphatase
  Pfam annotation: Domain name=S6PP_C; Domain location=5-128; Score =176.4; E_value=7.3e-50; Accession=PF08472.1; Description=Sucrose-6 -phosphate phosphohydrolase
MAISGPNVSARDLGFPYPKAGTAKPTDVVVKFYVLYEKWRRGELLGSSSVARYLKSITHSNGTIIHPSGSERSLHASVDALSSCYVDKQGNKNFRVWVDRLVTSPIGTSNWLVRFDNWEMEVPALSRAPALCAPDPARIAIPARNPRSAAPRKEGRRVEIAIPAGAFLPTAAAMEGRLYHSLPRQPFLPRQPAPASSAHPASRHSDAALPSLVARHLRAPTKPEGEIRCQLRAPRAPPAVTMMSRKSGKEGRASRLRETCQASLCPPPRYPRPPPRIGGKDGGVGGGGEDEGDYDEAEPGRHDGGEPVPEGMPASSHPTPPLSLRYEYASPHLHNATAMPTLEEFWDEEPS

SEQ ID NO: 78671 - protein, 156 aa, Zea mays
  Coding DNA Sequence Number=SeqID_36892
MPPSKVVHLPLQHRTAHTHTLAPTPFPCLDRSRLRGSIRWLYRDWRQGWRCRRGGEDEGDYDEAEPGRHDGGEPVPDIADAGGGGAPALHRLRPLLDFLASLVTCRKRCPAWKNLGMRSPRRNVLDSEQTRAKERKIHVLQGLGYTTSSPAVTPRA

SEQ ID NO: 78672 - protein, 402 aa, Zea mays
  Coding DNA Sequence Number=SeqID_36893
  Homolog annotation: Hit_ID=Q84ZX8; Match level="QueryCoverage=29%, HitCoverage=29%, E-value=2e-43, Identity=75%"; Hit description =Sucrose-phosphatase
  Pfam annotation: Domain name=S6PP_C; Domain location=5-128; Score =176.4; E_value=7.3e-50; Accession=PF08472.1; Description=Sucrose-6 -phosphate phosphohydrolase
MAISGPNVSARDLGFPYPKAGTAKPTDVVVKFYVLYEKWRRGELLGSSSVARYLKSITHSNGTIIHPSGSERSLHASVDALSSCYVDKQGNKNFRVWVDRLVTSPIGTSNWLVRFDNWEMEVPALSRAPALCAPDPARIAIPARNPRSAAPRKEGRRVEIAIPAGAFLPTAAAMEGRLYHSLPRQPFLPRQPAPASSAHPASRHSDAALPSLVARHLRAPTKPEGEIRCQLRAPRAPPAVTMMSRKSGKEGRASRLRETCQASLCPPPRYPRPPPRIGGKDGGVGGGGEDEGDYDEAEPGRHDGGEPVPEGMPASSHPTPPLSLRYEYASPHLHNATAMPTLEEFWDEEPSGVHVMLPSRIKVVVVSRSIKCDKVERTQFSSEVISFQQKDASNTKSLAFDG

SEQ ID NO: 78673 - protein, 139 aa, Zea mays
  Coding DNA Sequence Number=SeqID_36894
MKVILAEPLGHSMVRQQSRQVLQKSCLRSRCWRCSYSTGDISSNAERGEAGTEEEADQNQSSALFSVSVDDDSIDRKLDEYRGKISALAPHHYINLYRVHVMLPSRIKVVAVSRSIKCDKVERTQFCSEVISFQQLILI

SEQ ID NO: 78674 - protein, 201 aa, Zea mays
  Coding DNA Sequence Number=SeqID_36895
  Gene Ontology: Mol. function=inorganic anion exchanger activity; Cellular component=integral to membrane; Biological process=anion transport
  Homolog annotation: Hit_ID=Q1ZYR6; Match level="QueryCoverage=86%, HitCoverage=25%, E-value=2e-59, Identity=66%"; Hit description=Boron transporter
GSRVLVHVMLPSRIKVVAVSRSIKCDKDLFSVSPAYIFGAILPAFMVAGLYFFDHNVDSQLAQQKEYNLKKPSAYHYNILVLGFVVLLCGLLGIPPSNGVLPQSPMHTKSLAVIKRQFLSKKMVDTAKESIGGSATSLEIYGKMEEVFIKMDSEENTDSVERELKNFKDVVLQEGNEEGRLAREFDPRKHIEAHLPVRVNE

SEQ ID NO: 78675 - protein, 196 aa, Zea mays
  Coding DNA Sequence Number=SeqID_36896
MRIRNPEVAEEAVIEDFYRGSNDPAIVRVILQKAPATSEQLFREEDVYILTKPPKTREAKHPPAQKSIDFKVGGQHPPATNFTAGVIPWVPHLNRNNKTLLFPHLQQHGFENPEYGVYFRKSYPTKEKDSQGYAGLRETRCNKIGIFYQFPKPRRKKRRNSTGLNLTQSGPSPGKHARVRLHWQNCTEDPDYLKNR

SEQ ID NO: 78676 - protein, 71 aa, Zea mays
  Coding DNA Sequence Number=SeqID_36897
MGLKTLSMECTFASLTHQRKKTLKDMLAFGDQGFSRPEWVHTNREHRYSIGQPLATEGTCYSHHLSTPIAW

SEQ ID NO: 78677 - protein, 78 aa, Zea mays
  Coding DNA Sequence Number=SeqID_36898
MARVACTLRGKRLDGGVSVLSVRVNLIWIHFSKHFCKTESLIIEKPYLDSHITSIPLRVFSLVGYYETSSKGFSKSLT

SEQ ID NO: 78678 - protein, 116 aa, Zea mays
  Coding DNA Sequence Number=SeqID_36899
MNVCELTLAVSHPPQVKNRCCVGEAKDPEDNDAQDYRTSLLCLGDYRAATTPVQTSRVSRKKRRRRSSNSPAGRKHLPDRHGGSPARRGNPSEPRIRICGDDMGGGRGTEDLRGGG

SEQ ID NO: 78679 - protein, 323 aa, Zea mays
  Coding DNA Sequence Number=SeqID_36900
  Homolog annotation: Hit_ID=Q10MM4; Match level="QueryCoverage=31%, HitCoverage=26%, E-value=5e-31, Identity=70%"; Hit description =Expressed protein
MMYGTRNSSKVRRKLEDSVCKRKDDFTTRAPWFCLRHPLARAPLIPRSSPSLSKPLSHVAARCLPPSLSIDGRTQFREASAAALPFSPSPNTPSMEGHGSRDCLPSRSHHPRPACTPPSSLPPSTRQHHAPAPLPSTPSSPHARPHTSPSFSSSAQVLDAPSPTPVVPAYSDPGFARVASSPGTHHGGQGAWWVGEMGRSGGSTTSSRKKHSRSRPQAMDDDIDSSCSTPFASAPSSPGRPHAISGGSGGGGYFFSAPASPIHHLLLSTSCSASATPSTGGRGCVGDVEFEFGGPGGPMISADELFHNGQIRPLTLPPLRIER

SEQ ID NO: 78680 - protein, 671 aa, Zea mays
  Coding DNA Sequence Number=SeqID_36901
  Homolog annotation: Hit_ID=Q8SA97; Match level="QueryCoverage=47%, HitCoverage=59%, E-value=1e-104, Identity=64%"; Hit description =Ornithine carbamoyltransferase
  Pfam annotation: Domain name=DUF1771; Domain location=209-274; Score =57.4; E_value=4.6e-14; Accession=PF08590.1; Description=Domain of unknown function (DUF1771)
  Pfam annotation: Domain name=OTCace; Domain location=373-517; Score =153.9; E_value=4.3e-43; Accession=PF00185.14; Description =Aspartateornithine carbamoyltransferase, AspOrn binding domain
  Pfam annotation: Domain name=OTCace_N; Domain location=244-369; Score= 9.7; E_value=4.1e-09; Accession=PF02729.11; Description =Aspartateornithine carbamoyltransferase, carbamoyl-P binding domain
  Pfam module annotation: Pfam domain module=DUF1771::OTCace::OTCace_N; Domain location=209-274::373-517::244-369
PDVPTPIGGGSGGGGYFFSAPAQPHPPPPPLDLVLGLRDSQHRWAWVRGRRGVRVRRAWRAHDLRRRALPQRLDPAAHPAPVPDLDPGSDDDEDCDRAPTRGRDLTPRSASVHRRARSMSPLRSASPRLKLINALVPAPDLGPALDATGEAAPPITASPRSESRGEARDFARVRNTCFEQYSSSTKQSSGNKFQSISSGRVAPWLETGDAVESRGEARDFARVRNTCFEQARQAYLVGNKALAKELSMKGQAYNVQMKAAHEKAREAIYRQRNPISSQRGGDHLIDLHGLHVNEAIHILKDDIQMGKREETRDFARVLSGYNDIIMARVFAHQDILDLAKYAYVHVINGLTDNNHPCQIMADALSMLEQIGRIENTKVVYVGDGNNIVHSWLLLAVVLPFHFVCACPKGFEPDAHTVEMARGAGISKIEITNSPREAVKGADVVYIDVWASMGQKEEVDYRKQKFQGFTVDETLMEIAGPQAYLMHCLPAERGVEVIDGAIEAPNSIVFPQAENRRLRTECTLRTPSCFTRTQSIGARFCRYAINAHAPVKVVAPRIPHPPPPLLPAINTHASRRAADPPPYSPSAHRQWLDHFSFPGVGDEDEEAAFFEQRYLVGRDDGWAGPGGPIFFYCGNEGDIAWFAANSGLVWEAAPRFAARGKHALLIFFPACL

SEQ ID NO: 78681 - protein, 216 aa, Zea mays
  Coding DNA Sequence Number=SeqID_36902
  Subcellular localization annotation: CTP_CleavageSite=56; ConfidenceScore=5.19e-01
MQEACNRTTVVHPFGFIASGGSAGRPGPACHATSATVTACKETAPPLAPMPRLLVCGTSVVTQGSPTHDPTVPIEHNDHGSVSRGGRRDGRYGQKWADSNCSSRRAEATVKSPASSRPLLKRQESPLPRHEDDAPVFRSSNDSITCNSRPANRPSHRINSSGRAGDTFGRRSGRCFTSALMTTSKKGPGKGIFRKGSFLSEGNGPPSPPTDQGFEG

SEQ ID NO: 78682 - protein, 111 aa, Zea mays
  Coding DNA Sequence Number=SeqID_36903
  Subcellular localization annotation: CTP_CleavageSite=58; ConfidenceScore=5.23e-01
MAIARGIDPFFKAALPTRILKRHGQSLHRRAPGSSPYDTGAGSHTSCKLTRNERSQTTAREAGNHPAVISIPPFSLKPAGERADPHAGGVQPHHGYAPFRLHRIRWVSVKA

SEQ ID NO: 78683 - protein, 340 aa, Zea mays
  Coding DNA Sequence Number=SeqID_36904
MKTLPVTLEDASGESRLEKGIDPPGDSHAFALPSCIAPFHLLSLRMEGTRVALVLLLLEERDFAGDDDHQFGGGEKQAGCGLCPALSFKDLHHPCCGGGRAEPGFYLPHGPAGHLFLQHSGERALTGLAEGANFDNAGPTGRKRHQLQRAWLSWLCRGLRRCLLPPDLSVAVRPPRGRLSRRAQVGHVSGPPRIADCTRGSSKTSHAARAAFVFLDCLVLTPARRLRAEVAAVVGAEVVAAREGFSADETVGATCRSDPWLSGLDGPSGVEVVHTRGSGTGVPFVMNLRPLCDELGPEAAASAWTEAESARKEASSAREHVASLAEEVRQRRLELVQVVR

SEQ ID NO: 78684 - protein, 86 aa, Zea mays
  Coding DNA Sequence Number=SeqID_36905
MVSCGYMEKIKRYGLASMDQVASVKGKSKANELDDDGGGTSCYGQMVKGCRLLDGLVVVPRELFKGDCEEAAVVIVRGVVLASPER

SEQ ID NO: 78685 - protein, 61 aa, Zea mays
  Coding DNA Sequence Number=SeqID_36906
  Subcellular localization annotation: CTP_CleavageSite=4; ConfidenceScore=5.04e-01
MALTAMPKSSSKSSRALAVASLTGCRLLDGLVVVPRELFKGDCEEAAVVIVRGVVLASPER

SEQ ID NO: 78686 - protein, 97 aa, Zea mays
  Coding DNA Sequence Number=SeqID_36907
MVKGIMVGYTYGCPLFIMRRRRRKRMRRRLGPAGGGGLETPWRNAVVSRKEMELNAQGKGCRLLDGLVVVPRELFKGDCEEAAVVIVRGIVLASPER

SEQ ID NO: 78687 - protein, 50 aa, Zea mays
  Coding DNA Sequence Number=SeqID_36908
MSPSGWRGGRGDKVKGSAARDIIVDITPQLITLNQRSKSDKYHKNKHSIS

SEQ ID NO: 78688 - protein, 73 aa, Zea mays
  Coding DNA Sequence Number=SeqID_36909
MGVYGDGALQSTARWGRLESIARFKIEGLCNYRMVKVVAYGQVDVIVDLTPQLITLNQRSKSDKYHKNKHSSA

SEQ ID NO: 78689 - protein, 49 aa, Zea mays
  Coding DNA Sequence Number=SeqID_36910
MAASPASLYAPSSPSRFGDDIIVDITPQLITLNQRSKSDKYHKNKHSSS

SEQ ID NO: 78690 - protein, 118 aa, Zea mays
  Coding DNA Sequence Number=SeqID_36911
MGVWPKSRGVYGGGFAAVLLGSEGGTLKLTRWGPCVGVRAVRLCGGAEVPDVIVDITPQLITLNRRSKSNKYHKNKHFKFIDIYIKENNFVFVPKSRSPIPNGHFKLMIPKCEIHFCL

SEQ ID NO: 78691 - protein, 84 aa, Zea mays
  Coding DNA Sequence Number=SeqID_36912
MSKNPKDTRFIPRFGHTTKVPYFLVEAPTKSWVSFNPNPPFADHKDSSRRWNFNKIWPFKSIRLLIANADSGYSKIIFGLLGFA

SEQ ID NO: 78692 - protein, 82 aa, Zea mays
  Coding DNA Sequence Number=SeqID_36913
MKKIPAPSLKVKEEAASTPPAPLPFEELQEPVPFEEEFDPVLPPQSPLEEPESAFAIGNRMLLKDQILWKLHLLEESASEDM

SEQ ID NO: 78693 - protein, 95 aa, Zea mays
  Coding DNA Sequence Number=SeqID_36914
MKKIPTPSLEVKEEAASTPPAPPPYEELQEPVPLEEEFDPVLPSQSPPEEHQKTNQGRNPCGSSQEEESAFAISNRMLLKGQILLKVHLLEESAK

SEQ ID NO: 78694 - protein, 112 aa, Zea mays
  Coding DNA Sequence Number=SeqID_36915
MGRRRVDREAEKAINDDTKWRGLSQNLPRKVSQDQNGFTPTESTNTPPSSLLPQRVHATLAISPLLAYVNSHQGFSRPEWVHANREHRYTTVQPLATEGTRYSRHLSTPIAW

SEQ ID NO: 78695 - protein, 125 aa, Zea mays
  Coding DNA Sequence Number=SeqID_36916
MGLKTLSTECTFASLTRQRKKTYQGYAGLWDSRHLAYTSHLLAPLEFTGLLRVSQDQNGFTPTESTDTPPSSLLPQRVHATLVISPLPLCGGLSGIGPTEAKLTHDEACGQLKGPRSSSLHRHGP

SEQ ID NO: 78696 - protein, 233 aa, Zea mays
  Coding DNA Sequence Number=SeqID_36917
MEVLKSRLGLRTCDVLSRLIKDYSECRFDDRGPFNWPHASSWVSFASVGPIPERPPRNGSGEMTRVACTLCGNRLDGGVSVLSVGVNPVCISLRVFFLSRVRLAKVHFVLRVFEPMLLQWFISGPWDTRTDPVKLSGAHASHLRSLRQGQVHVGPITWEVLPHRRSLHNAWTKVLSRECLIPVLYDEDITMSTTTPAAPPHQAPLPSLAAPITWARARDLNFVMLLKNEGPEE

SEQ ID NO: 78697 - protein, 176 aa, Zea mays
  Coding DNA Sequence Number=SeqID_36918
  Gene Ontology: Mol. function=hydrolase activity, hydrolyzing O -glycosyl compounds; Biological process=carbohydrate metabolic process
  Homolog annotation: Hit_ID=Q6L597; Match level="QueryCoverage=33%, HitCoverage=11%, E-value=2e-17, Identity=67%"; Hit description =Putative beta-glucosidase
MALVLMGRSAFLQGLTALRLESEPFQEIGPFHVDTTARPSAISNTPGTQIVDSVIALFRVDFSGRGELAERQATRSANLTFCEEGCRYIYMIGASDVKLDIRNGANVKGYFVWSFLDVFELLVGYYSRYTIYHVDFQDPELPRMPKLSALCFHALLRAEYNSHFSLCRGRGGTTVM

SEQ ID NO: 78698 - protein, 223 aa, Zea mays
  Coding DNA Sequence Number=SeqID_36919
  Gene Ontology: Mol. function=hydrolase activity, hydrolyzing O -glycosyl compounds; Biological process=carbohydrate metabolic process
  Homolog annotation: Hit_ID=Q6L597; Match level="QueryCoverage=26%, HitCoverage=11%, E-value=3e-17, Identity=67%"; Hit description =Putative beta-glucosidase
MTSVDSYKFCSIINKVESLQQLAIQRPREQIVDENAVAEATCLVTSVDGTGTNGTECISAGPDCSSFGIGAFQEIGPFHVDTTARPSAISNTPGTQIVDSVIALFRVDFSGRGELAERQATRSANLTFCEEGCRYIYMIGASDVKLDIRNGANVKGYFVWSFLDVFELLVGYYSRYTIYHVDFQDPELPRMPKLSALCFHALLRAEYNSHFSLCRGRGGTTVM

SEQ ID NO: 78699 - protein, 209 aa, Zea mays
  Coding DNA Sequence Number=SeqID_36920
  Gene Ontology: Mol. function=hydrolase activity, hydrolyzing O -glycosyl compounds; Biological process=carbohydrate metabolic process
  Homolog annotation: Hit_ID=Q6L597; Match level="QueryCoverage=28%, HitCoverage=11%, E-value=3e-17, Identity=67%"; Hit description =Putative beta-glucosidase
MTSVDSYKFCSIINKVESLQQLAIQRPREQIVDENAVGPYHLFGTIRPDCSSFGIGAFQEIGPFHVDTTARPSAISNTPGTQIVDSVIALFRVDFSGRGELAERQATRSANLTFCEEGCRYIYMIGASDVKLDIRNGANVKGYFVWSFLDVFELLVGYYSRYTIYHVDFQDPELPRMPKLSALCFHALLRAEYNSHFSLCRGRGGTTVM

SEQ ID NO: 78700 - protein, 200 aa, Zea mays
  Coding DNA Sequence Number=SeqID_36921
  Gene Ontology: Mol. function=nucleic acid binding
  Homolog annotation: Hit_ID=Q10MC7; Match level="QueryCoverage=30%, HitCoverage=11%, E-value=2e-17, Identity=62%"; Hit description=Pre -mRNA splicing factor ATP-dependent RNA helicase, putative, expressed
  Subcellular localization annotation: CTP_CleavageSite=84; ConfidenceScore=5.13e-01
MERAERTSLAPVVVPKTGFYILVWYTFSTYLMPYSQLLSSVPAQFLLSSGKNCRMFFLFPVCCVLHLLSSGVDTLIMGFSSMVACTHPRRVATFLVFRHVAEEMDVTLGEETDGMLLREAMVDPLLEKYKVIVLDETHERTFNSIQRPREQIVDENAVGPYHLFGTIRPGCSSFGIGAFREIGPFRVDTDGKTLCNFKYA

SEQ ID NO: 78701 - protein, 72 aa, Zea mays
  Coding DNA Sequence Number=SeqID_36922
MEPAGMCHLGREASAQESTTKLESMERAECTSLAPVVVPKTGFYILVWYTFSTYLMPYSQLLSSVPTQRTGI

SEQ ID NO: 78702 - protein, 149 aa, Zea mays
  Coding DNA Sequence Number=SeqID_36923
  Gene Ontology: Mol. function=protein phosphatase type 2C activity
MAYVPIIARRLLAESARHLLVEPRGDKVPLPRIGDSAQRSPLMTARLPRCDTNAARYRASSRNPLNNPRVVDVGDNHEAPLLNDGQRGAAALDRVQTAASRELVVHSGACDHVRLLLEVELTVSKLLLVIDERRQCECLLLMEFVRGLK

SEQ ID NO: 78703 - protein, 71 aa, Zea mays
  Coding DNA Sequence Number=SeqID_36924
  Gene Ontology: Mol. function=protein phosphatase type 2C activity
MNVCELTLAVSHPPQVKNRCSVQNNPRVIDVGDNHEAPLLNDGQRGTAALDRVQAAASRELVVHSGACDHV

SEQ ID NO: 78704 - protein, 117 aa, Zea mays
  Coding DNA Sequence Number=SeqID_36925
  Gene Ontology: Mol. function=protein phosphatase type 2C activity; Cellular component=nucleus
  Homolog annotation: Hit_ID=Q2HW33; Match level="QueryCoverage=81%, HitCoverage=38%, E-value=2e-16, Identity=38%"; Hit description =Protein phosphatase 2C-like
  Subcellular localization annotation: CTP_CleavageSite=21; ConfidenceScore=5.10e-01
MTRRSLETVSSTSKSSLYVVACAAVYDKLPRSRRLDAVQSSCTALSIVKQGGLMVVANVDDSRGYYLADEPGVHFVWQPNQESSVLVMSRAFDDFYIEDCGVILAPEVTQRRIDNSD

SEQ ID NO: 78705 - protein, 148 aa, Zea mays
  Coding DNA Sequence Number=SeqID_36926
  Homolog annotation: Hit_ID=Q8S985; Match level="QueryCoverage=22%, HitCoverage=4%, E-value=4e-09, Identity=84%"; Hit description =Arabidopsis ETTIN-like protein 1
MARGRASAPLCPPPLPRRQLPRGDEHARPRAHHHHHASTPLVHLLARGLQPVATVARACGQGFARNRVEVPPHISRCQRFIYKHTKSTVRNTVDYSGQEKLFGKTGQARTVRALATDRPHHQDDPQTEPMQKSESALWTVRRRRADRL

SEQ ID NO: 78706 - protein, 303 aa, Zea mays
  Coding DNA Sequence Number=SeqID_36927
  Gene Ontology: Mol. function=DNA binding; Cellular component=nucleus; Biological process=regulation of transcription, DNA-dependent
  Homolog annotation: Hit_ID=Q8S985; Match level="QueryCoverage=56%, HitCoverage=22%, E-value=1e-75, Identity=81%"; Hit description =Arabidopsis ETTIN-like protein 1
  Pfam annotation: Domain name=B3; Domain location=119-236; Score=78.0; E_value=2.9e-20; Accession=PF02362.12; Description=B3 DNA binding domain
MATRFIDSGKQLVFDHATQFFTASIRTAAEAVVNNYICARLSLRYRHLMEDVLSLLPHVKKDNQDKVESKQSKGNTLNKLLELRSCFSCLSSRREVKKPKKPKVKKPKVKQRFSRMLHMFCKTLTASDTSTHVGFSVPHRAAEDCFPPLDYSQQRPSQELVAKDLHGTEWRFRHIYRALCAMLSISHVIGQPRRHLLTTGWSAFVNKKKLVSRDAVLFLRGDNGELRLGVRRAAQLKNGSAFPALYNQCSNLGSLPNVAHVVATKSVFHIYYNPRSGGNAYVIGDSAKLEQKWHAYYATTEHP

SEQ ID NO: 78707 - protein, 224 aa, Zea mays
  Coding DNA Sequence Number=SeqID_36928
MGTCSGADARGEEPCRVVEHELLATVDEPSRHPPPRPCTPCIDSEHVLGETKGGGGRNHVEDDGADAYEIPEAPPGPSAVRAQPWPSGALTWFLPLPQAPRWDLATDAQRRDLVPTGIEAVRRQGAVVGRVPLRTIAGSLDLKEAALLLRVDVGRGCLRVDRHTSACRGVSSCGGQKLGRHHAEAKGRGRLGDAAITMGKAGAGSLRWCRRDPWAAIWGVERED

SEQ ID NO: 78708 - protein, 160 aa, Zea mays
  Coding DNA Sequence Number=SeqID_36929
MADNPGGYSPAVEMTTGQATMKGGIAVVPPLRREIAARPPKFRGGKVKTPLGHLYDPHKPSIEDGATLDFRCTDQNSSMEYNFVYIIYFIHLLEQMFQISKVLLKKKRENREQYWAGSSPDGPSPGKMRTRPRPCRQFYTEIPTVLNNLNQVLCTIAMSR

SEQ ID NO: 78709 - protein, 147 aa, Zea mays
  Coding DNA Sequence Number=SeqID_36930
MVKQGGLAQDFHRLRAVTGTDCGFNTVFLRVSYANVHLRRGKFISQPHDPQWVAQIRLHPHRNGGYSPAVEMTTGQATMKGGIAVVPPLRREIPQPPRTFRSSRCRGYFRHALMISPDHRNRPSSDETWFWLGARGLSAAANWISGL

SEQ ID NO: 78710 - protein, 181 aa, Zea mays
  Coding DNA Sequence Number=SeqID_36931
MVKQGGLAQDFHRLRAVTGTDCGFNTVFLRVSYANVHLRRGKFISQPHDPQWVAQIRLHPHRNGGYSPAVEMTTGQATMKGGIAVVPPLRREIPQPPRTFRSSRCRGYFRHALMISPDHRNRPSSDETWFWLGARGLSAAANWISGPMTAQKGVDEGRKGAGDDPTYLPEDSVPRSGCNGA

SEQ ID NO: 78711 - protein, 569 aa, Zea mays
  Coding DNA Sequence Number=SeqID_36932
  Gene Ontology: Mol. function=catalytic activity; Biological process =fructose 2,6-bisphosphate metabolic process
  Homolog annotation: Hit_ID=Q00ZF3; Match level="QueryCoverage=54%, HitCoverage=45%, E-value=2e-28, Identity=31%"; Hit description=[G] KOG0234 Fructose-6-phosphate 2-kinase/fructose-2
MARAALRLGVRALALLVFVSVALLPLVSSDDGYRHCEGVVRGWADASSGRVKDGDKLSLKDLLFFLHIPRTGGRTYFHCFLKKLYTNAQECPRSYDKLRFDPSHPDCKLVVSHDDYSLTSKLPRERTSVVTILRNPVDRVFSTYEFSVEVAARFLVHPNLTSAKLMTTRVLTKSRAVSTLDIWPWKYLVPWMREDLFARRDARGVYKVHSSKKVNAYDVDDMVMPLHRYINDPVAHEIIHNGATFQITGLTNNSYFDGAHEVRHCVRKHPDLGRIVLEVAKNRLDQMLYVGLTEDHEESARLFAHMVGAQVLSQSGTLTLDLKEDLPIETDSHPSMEPEDEETNGHLMTVGKLMEAYETCIAKLWKSQSGRRKISLKKVQEANFSKEARKLVSEAILNQIISLNRLDMELYDHAKKIFTQEHLMLKAQQSMVGQHRQFGEQKGWIGVMCSVGICPPWMVVLVVLGISTIIVLVTLAVTTRKRTSKLKDQLGRRGQQITSSRVKTLPKNLIRPLPVQDLEDEGFRRPALLIVYAPLRSGRRELKGGSAMKRGESELGSGMIWRLAVGLLL

SEQ ID NO: 78712 - protein, 222 aa, Zea mays
  Coding DNA Sequence Number=SeqID_36933
MTVGKLMEAYETCIAKLWKSQSGRRKISLKKVQEANFSKEARKLVSEAILNQIISLNRLDMELYDHAKKIFTQEHLMLKAQQSMVGQHRQFGEQKGWIGVMCSVGICPPWMVVLVVLGISTIIVLVTLAVTTRKRTSKLKDQLGRRGQQITSSRVKTLPKNLIRPLPVQDLEDEGFRRPALLIVYAPLRSGRRELKGGSAMKRGESELGSGMIWRLAVGLLL

SEQ ID NO: 78713 - protein, 144 aa, Zea mays
  Coding DNA Sequence Number=SeqID_36934
MGGATGQGSTVGAYSLSCCARWARWGRGKWEYGPASWASGHKRNFIPPNSGCYKSNPLNRISPSRFEKSLERTTRCLRPINAILGDLLDLWVRTHTRFRCATLILLVDVDRIVFIEMVVFTYKGETTPRPSKGKGNNKTCRIGA

SEQ ID NO: 78714 - protein, 137 aa, Zea mays
  Coding DNA Sequence Number=SeqID_36935
MGRRASGLFERNYGVLWILPILRAAWGNRRLRKGAPRGAYSRPIDAILEDLLDLWVRTHTRFRCATPILLVDVDRIIFIGMMLTLILTDLEELEVAKWTGARGKNREKRLSRDKEEDIAKGRISKTRLSNWIGDWRF

SEQ ID NO: 78715 - protein, 139 aa, Zea mays
  Coding DNA Sequence Number=SeqID_36936
MAAAGGSTGSLPGYSPREKEGEALVAGGEGVEAMGGFLRVGQGNGSGMGGLGKTRRHGGETVGGDEQERGRPGRWDPHVGVGGVPTRSARLGKRIIFTTTDAILEDLLDLWVRTHTRFHCGTSILLVDVDRIVFIGVSG

SEQ ID NO: 78716 - protein, 190 aa, Zea mays
  Coding DNA Sequence Number=SeqID_36937
MQYKESSSLISCEKQTIRIEFLNLASSRGEEKGGGAYRRRDCSGEVAEGEGEVAGITTGGPRDAREDMSERNRAETHWIARSTRGGGRPKSGEGDLGPPVKSGRVRGLGELHGLLAELAEALVGLEGGWSELATAAEALAAMAGGKTLAGAKERWLAGEGECGAKREIWSQEIWSVSLPKPEANPKFCRV

SEQ ID NO: 78717 - protein, 49 aa, Zea mays
  Coding DNA Sequence Number=SeqID_36938
MAGGNTLAGAKERWLADEGECGAKREIWSQEIWSVSLPKPEANPKFCRV

SEQ ID NO: 78718 - protein, 65 aa, Zea mays
  Coding DNA Sequence Number=SeqID_36939
MAGGNTLAGAKERWLADEGECGAKREIWSQEIWSVSLPQTRRQIPSFVVSRARVPMPSSGTRQRG

SEQ ID NO: 78719 - protein, 101 aa, Zea mays
  Coding DNA Sequence Number=SeqID_36940
MEPYFMITGRKTKRTARGFLNAASRILPGARSLFQGSSSSQRRQEALLRHAWPELRDTHIALQQSTDEEEDEEEEVQHHEEEDEQAHEEEEVQAHEEEEEV

SEQ ID NO: 78720 - protein, 115 aa, Zea mays
  Coding DNA Sequence Number=SeqID_36941
MEPYFITNGIRQSQYGITEEEEDDEEVQHHEEEDEQAHEEEEVHAHEEEEEVGIDAEADDDTTEAPVVRRRGTRKGHFVLPLSAPAQSEARVLIIPVGDSQWEDTSFDGRGHHRQ

SEQ ID NO: 78721 - protein, 214 aa, Zea mays
  Coding DNA Sequence Number=SeqID_36942
MEPYFMMSGRKTKRTARGFLNAASRILPEEDEEEEVQHHEEEDEQAHEEEEVQAHEEEEVGIDAEADDDTTEAPVVRRRGTRKGHFVLPPSAPAQSEARVLIIPVGDSQWEDTSFDGQGIVTDPKGVVVPCTSWSHFALAPHATYGTAQGAVKHDFWRRYRVKPEAQEHADRVLEKNAKKVVNAYMKRRGHSINNFRQYSDVYLTVDQYMEVKI

SEQ ID NO: 78722 - protein, 380 aa, Zea mays
  Coding DNA Sequence Number=SeqID_36943
  Homolog annotation: Hit_ID=Q6ZIK5; Match level="QueryCoverage=20%, HitCoverage=22%, E-value=7e-12, Identity=46%"; Hit description =Putative growth-regulating factor 1
  Pfam annotation: Domain name=Keratin_B2; Domain location=240-377; Score=-69.5; E_value=0.037; Accession=PF01500.7; Description=Keratin, high sulfur B2 protein
  Pfam annotation: Domain name=WRC; Domain location=44-86; Score=15.7; E_value=0.0033; Accession=PF08879.1; Description=WRC
  Pfam module annotation: Pfam domain module=Keratin_B2::WRC; Domain location=240-377::44-86
MGLEIAQTTPAFVALGIPSVMFLGPHVGAQQPFGYGTYFGKRLDPEPGPAHGRKEVAVLQRGRPGLHCERHMHRGRKRSRKPVETQPAPQSQPPAAGAAAAANGSSFRNHSLYPAIAGGGGGGASSISAPPFSSIESRLSCTWTVLLPAAALGGGGRQDGPPPCALLGFRARLQHRSDASTDGMVAITGESMELPGRACDVASPSSAVTSTRRADGSYRRAVASPVYVVASTRRADGRAQGSFRRAMAECGCGRALASPGCAVAASCCAGSYGRDLALPVCAVASTRRAHGCAQVSFRRAMAECGCGPALASPGCAVAASCCVGSYRRDLALPVCAVASTLRAQVSFRRAMAECGCGPALASPGCAVAASCCAGDPLPGS

SEQ ID NO: 78723 - protein, 193 aa, Zea mays
  Coding DNA Sequence Number=SeqID_36944
  Homolog annotation: Hit_ID=Q6ZIK5; Match level="QueryCoverage=41%, HitCoverage=23%, E-value=2e-12, Identity=46%"; Hit description =Putative growth-regulating factor 1
  Pfam annotation: Domain name=WRC; Domain location=74-116; Score=15.7; E_value=0.0033; Accession=PF08879.1; Description=WRC
MGGSEAATCPEKAAHSKASTVSPDPHGRAPDPRMYSPNPQGWSRTPEYTVRTPKGKKEPIYIVGYGTYFGKRLDPEPGPAHGRKEVAVLQRGRPGLHCERHMHRGRKRSRKPVETQPAPQSQPPAAGAAAAANGSSFRNHSLYPAIAGGGGGGASSISAPPFSSIESRLSCTWTVLLPAAALGGGGGGAQGVK

SEQ ID NO: 78724 - protein, 152 aa, Zea mays
  Coding DNA Sequence Number=SeqID_36945
  Homolog annotation: Hit_ID=Q6ZIK5; Match level="QueryCoverage=53%, HitCoverage=23%, E-value=6e-13, Identity=45%"; Hit description =Putative growth-regulating factor 1
  Pfam annotation: Domain name=WRC; Domain location=33-75; Score=15.7; E_value=0.0033; Accession=PF08879.1; Description=WRC
MVRSHFASTTSQLLGWSPFLSVGYGTYFGKRLDPEPGPAHGRKEVAVLQRGRPGLHCERHMHRGRKRSRKPVETQPAPQSQPPAAGAAAAANGSSFRNHSLYPAIAGGGGGGASSISAPPFSSIESRLSCTWTVLLPAAALGGGGGGAQGVK

SEQ ID NO: 78725 - protein, 149 aa, Zea mays
  Coding DNA Sequence Number=SeqID_36946
MAATFTPATAKGKDAPTCGTRSPVHGTREILGHRPGGIPWEVVSAVLQILPPLTEISSSRFVRKRMQKLSMVTHQGRRRIRDSTWRYPSPSAPITVRSRRPQRGKHVTRYEEHLTESGGSGSSFTRGEQRKCKSGDKISVTVWVTTNSA

SEQ ID NO: 78726 - protein, 49 aa, Zea mays
  Coding DNA Sequence Number=SeqID_36947
MAATFTPATAKGKDAPTCGTRSPVHGTREILGHRPGGIPWEVVSAKEES

SEQ ID NO: 78727 - protein, 104 aa, Zea mays
  Coding DNA Sequence Number=SeqID_36948
MTKNLPARKTRRVWSTARSGIAAAAKFGEEFRLRRGLVFWSERTVEKIFRVPAMAATFTPATAKGKDEPTCGTRSPVHGTREILGHRPGGIPWEVVSAVRDSRQ

SEQ ID NO: 78728 - protein, 333 aa, Zea mays
  Coding DNA Sequence Number=SeqID_36949
  Homolog annotation: Hit_ID=Q9LTK0; Match level="QueryCoverage=27%, HitCoverage=49%, E-value=5e-13, Identity=45%"; Hit description =Arabidopsis thaliana genomic DNA, chromosome 5, BAC clone:F17P19
  Subcellular localization annotation: CTP_CleavageSite=72; ConfidenceScore=5.51e-01
MAPCTLYDDGDSQPPYGSKRTRPLSVPLTPPLSPTPPAAPSPRAIPARLLQGRNGVVPRAWKVAIPVRHPCSAAPRKEGRRVEDPPSLSAPPTPRHHILRAVCYKKRSACGDGRSDPAIPALALLSRLSSLCWIYGRQLRAHQPQIARHLLDLHYPITSDPNKSAFVLAKTVFRASVRSAAHSFPPPTPGGSQDSEAVFLELPCICQDTMKAREPKKARGHVKWNEENLNDIESNKPEREKITEPKTPYHPMLDEDEGPVSPLHLSESSVDKSAHADAIKTALAEAVSSGKIFDRNSWDMCDSEEAIKQGKGYQFDIFDYILLCISKLKLEYS

SEQ ID NO: 78729 - protein, 143 aa, Zea mays
  Coding DNA Sequence Number=SeqID_36950
  Gene Ontology: Mol. function=protein phosphatase inhibitor activity; Biological process=regulation of signal transduction
  Homolog annotation: Hit_ID=Q9LTK0; Match level="QueryCoverage=95%, HitCoverage=80%, E-value=3e-19, Identity=38%"; Hit description =Arabidopsis thaliana genomic DNA, chromosome 5, BAC clone:F17P19
  Pfam annotation: Domain name=IPP-2; Domain location=14-133; Score= -33.7; E_value=0.003; Accession=PF04979.4; Description=Protein phosphatase inhibitor 2 (IPP-2)
MKAREPKKPRGHVKWNEENLNDIELNKPEREKITEPKTPYHPMLDEDEGPVSPLHLSESSVDKSAHADAIKTALAKAVSSGKIFDRNSWDTCDSEEAIKQGKAFEEQWKVHYDEYHKMKELLEKGTMNDDSDEDEGDLGNKKG

SEQ ID NO: 78730 - protein, 167 aa, Zea mays
  Coding DNA Sequence Number=SeqID_36951
  Gene Ontology: Mol. function=protein phosphatase inhibitor activity; Biological process=regulation of signal transduction
  Homolog annotation: Hit_ID=Q9LW08; Match level="QueryCoverage=30%, HitCoverage=28%, E-value=2e-16, Identity=74%"; Hit description =Signal sequence processing protein; peptidase-like protein
MKAREPKKARGHVKWNEENLNDIESNKPEREKITEPKTPYGAMLDEDEGPVSPLHLSESSVDKSAHADAIKTALAEAVSSGKIFDRNSWDTCDSEEAIKQGKGDNNPGDDRVLYAHGQLWLQRQHIIGRAVGYLPYAGWLTIIMTEKPVLKYLLIGALGLLVVASKE

SEQ ID NO: 78731 - protein, 96 aa, Zea mays
  Coding DNA Sequence Number=SeqID_36952
  Gene Ontology: Mol. function=metal ion binding; Cellular component =integral to membrane
  Homolog annotation: Hit_ID=Q6KAE5; Match level="QueryCoverage=98%, HitCoverage=15%, E-value=7e-31, Identity=73%"; Hit description =Putative receptor-like kinase Xa21-binding protein 3
  Pfam annotation: Domain name=Ank; Domain location=63-95; Score=1.5; E_ value=19; Accession=PF00023.20; Description=Ankyrin repeat
  Pfam annotation: Domain name=Ank; Domain location=8-40; Score=43.1; E_ value=9.5e-10; Accession=PF00023.20; Description=Ankyrin repeat
  Pfam module annotation: Pfam domain module=Ank::Ank; Domain location =63-95::8-40
MVNQKADGGLTPLHMAALNGHVECVQLLLDLGASVSEVTIEDGTTIDLIGITFAFLVAYSCWAGSTPLHYAACGGNAVCCQMDPFNGGSFLAKKFS

SEQ ID NO: 78732 - protein, 96 aa, Zea mays
  Coding DNA Sequence Number=SeqID_36953
  Gene Ontology: Mol. function=metal ion binding; Cellular component =integral to membrane
  Homolog annotation: Hit_ID=Q6KAE5; Match level="QueryCoverage=95%, HitCoverage=15%, E-value=1e-30, Identity=75%"; Hit description =Putative receptor-like kinase Xa21-binding protein 3
  Pfam annotation: Domain name=Ank; Domain location=63-95; Score=1.5; E_ value=19; Accession=PF00023.20; Description=Ankyrin repeat
  Pfam annotation: Domain name=Ank; Domain location=8-40; Score=43.1; E_ value=9.5e-10; Accession=PF00023.20; Description=Ankyrin repeat
  Pfam module annotation: Pfam domain module=Ank::Ank; Domain location =63-95::8-40
MVNQKADGGLTPLHMAALNGHVECVQLLLDLGASVSEVTIEDGTTIDLIGITFAFLVAYSCWAGSTPLHYAACGGNAVCCQMDPFNGGSFLAKKFR

SEQ ID NO: 78733 - protein, 81 aa, Zea mays
  Coding DNA Sequence Number=SeqID_36954
MFASLFEKYLGFNVAGAGSTPLHYAACGGNAVCCQVCAAISARGERPEDWVPPEDVSAVHYAKCDGIDETLPMVLTGTMGL

SEQ ID NO: 78734 - protein, 182 aa, Zea mays
  Coding DNA Sequence Number=SeqID_36955
MVKIFGSETVQIAMNVVVTSHPPVCLYSAAGRKAKRWNCYTRRAVTHTRCAVDRKDQTVTLQSGLGTRSEVGSFLRNELREGVFWTFGFPKLKRFFFTGQARYEERSSTAKGATVGVVLRRRAGKKARARRAGSGSQQLGSARRSERARAEPVFVAREKSESARLGAAHELARGSTQQQFVT

SEQ ID NO: 78735 - protein, 247 aa, Zea mays
  Coding DNA Sequence Number=SeqID_36956
MVKNFGSETVQIAMNAVVTSHPPVCLYSAAGRKAKRWNCYIRRAVTHTRCAVDRKDQTVTLQSGLGTRSEVGSFLRNELREGVFWTFGFPKLKRFFFTGQARYEERSSTAKGATVGVVLRFALFTPPLGDYQLPTAPTPKADEDGLVRQEDAHRCALERPAGENGQAAGDKVATREGEGEVVAGVGVSAGEGLGGAGRVGRAPLPERWAGEAEGHAGKAGGRGAERSAEMTAERSAEMTAITLACFY

SEQ ID NO: 78736 - protein, 208 aa, Zea mays
  Coding DNA Sequence Number=SeqID_36957
  Subcellular localization annotation: CTP_CleavageSite=49; ConfidenceScore=5.07e-01
MVKNFGSETVQIAMNAVVTSHPPVCLYSAAGRKAKRWNCYTRRAVTHTRCAVDRKDQTVTLQSGLGTRSEVGSFLRNELREGVFWTFGFPKLKRFFFTGQARYEERSSTAKGATVGVVLRLHIALVFSPSSRPKHLRTSPQQQESLAGPPSQQNPPEGLPRNPLQDRHHSKILPRAFPGIPCRTAITAKSSRGPPYTDHSPTALAPFG

SEQ ID NO: 78737 - protein, 124 aa, Zea mays
  Coding DNA Sequence Number=SeqID_36958
MQESLAGPPSQQNPPEGLPRNPLQDRHHSKILPRAFPGIPCRTAITAKSSRGPPYTDHSPTALAPFGYQLALQMTRVLTAKRSNTDIHEELGVCFVKILKTQLHPTKGSRVDSQKEQGLIRIQA

SEQ ID NO: 78738 - protein, 95 aa, Zea mays
  Coding DNA Sequence Number=SeqID_36959
  Homolog annotation: Hit_ID=Q2UQ84; Match level="QueryCoverage=33%, HitCoverage=2%, E-value=4e-07, Identity=73%"; Hit description =Vesicle coat complex COPI
  Subcellular localization annotation: CTP_CleavageSite=57; ConfidenceScore=5.09e-01
GKFNRGPERFNRGPGQVQPGSREVQPVSRESSAGSDLQSASLTGRLSVSLPQAVEPVLGAVQPVLVNLTSLQMWDYRMGTLLNRFEEHDGPVRGI

SEQ ID NO: 78739 - protein, 76 aa, Zea mays
  Coding DNA Sequence Number=SeqID_36960
  Subcellular localization annotation: CTP_CleavageSite=64; ConfidenceScore=5.06e-01
MDDQYDVTQEWLDRVKIARKGLRGTKRRASSTGVQRGSTGVHGKFNRGPERFNRCPGKVQPGLTCSLTGRLSVSLP

SEQ ID NO: 78740 - protein, 61 aa, Zea mays
  Coding DNA Sequence Number=SeqID_36961
  Subcellular localization annotation: CTP_CleavageSite=23; ConfidenceScore=5.19e-01
MDAQNDVTQEWLDRVKTARKGLRGTKRRASSTGVQRGSTGVQGKFNRGPKRFNRCPGKVQP

SEQ ID NO: 78741 - protein, 85 aa, Zea mays
  Coding DNA Sequence Number=SeqID_36962
  Gene Ontology: Mol. function=catalytic activity
  Homolog annotation: Hit_ID=Q2QNG7; Match level="QueryCoverage=61%, HitCoverage=12%, E-value=9e-23, Identity=90%"; Hit description=ATP -citrate synthase, putative, expressed
MVNGEPYPLDIRGELDDTTAFKNFKKWGGIEFPLPFGRVLSPTESFIHELDEKIEIILGKSDKFDELMVAAADERGEVEDGEEQA

SEQ ID NO: 78742 - protein, 164 aa, Zea mays
  Coding DNA Sequence Number=SeqID_36963
  Gene Ontology: Mol. function=catalytic activity; Cellular component =intracellular; Biological process=metabolic process
  Homolog annotation: Hit_ID=Q2QZ87; Match level="QueryCoverage=94%, HitCoverage=50%, E-value=2e-58, Identity=64%"; Hit description=ATP -citrate synthase, putative, expressed
MALNLDFDQVKEFIKERLGIERGWATLSASQSVGGIEIEENWDKVKTIFLPTEKPTTSDSCAPLIATHPLEAHRKFGDFIKGVFAVFHGFGKYFSFLEMNPFAMVNGEPYPLDIRGELDDTTAFKNFKKWGGIEFPLPFGRVLSPTESFIHELDEKGVFHSADM

SEQ ID NO: 78743 - protein, 195 aa, Zea mays
  Coding DNA Sequence Number=SeqID_36964
  Gene Ontology: Mol. function=catalytic activity; Cellular component =intracellular; Biological process=metabolic process
  Homolog annotation: Hit_ID=Q2QZ87; Match level="QueryCoverage=86%, HitCoverage=54%, E-value=3e-65, Identity=65%"; Hit description=ATP -citrate synthase, putative, expressed
MRRLLGLALCASAATQSRPDMLFGKPGKSGLMALNLDFDQVKEFIKERLGIERGWATLSASQSVGGIEIKENWDKVKTIFLPTEKPTTSDSCAPLIATHPLEAHRKFGDFIKGVFAVFHGFGKYFSFLEMNPFAMVNGEPYPLDIRGELDDTTAFKNFKKWGGIEFPLPFGRVLSPTESFIHELDEKGVFHSADM

SEQ ID NO: 78744 - protein, 177 aa, Zea mays
  Coding DNA Sequence Number=SeqID_36965
  Homolog annotation: Hit_ID=Q6YS19; Match level="QueryCoverage=31%, HitCoverage=24%, E-value=1e-10, Identity=54%"; Hit description =Senescence-associated protein-like
MWQPLIHAQNVPATGVPVPTLDQHAIWSTHEPVHINPSDPSRYQQNGTPAKERSQCTVQGKYDSIIVEVKSYYMSMSRYRDDKKRKGEIMKVYANDQIKTCVEFPECFVYEQSSTCKFLLCALVVIGRKTHVVGRGLMSTITMDVDTTARVDEFLVTTFVGPLVEEDLTRGPMNTLF

SEQ ID NO: 78745 - protein, 112 aa, Zea mays
  Coding DNA Sequence Number=SeqID_36966
MSCSGSTQDPSRRAPPLLPKRSQVSCVQAHTVIEMTYTEQQLTTAIVSQASPLAEYELKKYERSNILDTATAICPTMWQPLIHAQNVPATGVPVPTLDQQFNMQVEMKPRAK

SEQ ID NO: 78746 - protein, 154 aa, Zea mays
  Coding DNA Sequence Number=SeqID_36967
MAVEVDARWEPMGAQEYYYYWRAMYNARGNSLNFIFMVLFVQCSHLMCLAWMLLARCVLGKLQVHRLVKHVCPKVNIQKDNGVQMKIIGTHVDATEIVYDEDSYNKAQNICNLFFDKSSKICPTMWQPLIHAQNLPATGVLIPTLDQHASRNEA

SEQ ID NO: 78747 - protein, 687 aa, Zea mays
  Coding DNA Sequence Number=SeqID_36968
  Gene Ontology: Mol. function=prolyl aminopeptidase activity; Cellular component=intracellular; Biological process=protein metabolic process
  Homolog annotation: Hit_ID=Q6K669; Match level="QueryCoverage=51%, HitCoverage=63%, E-value=1e-140, Identity=69%"; Hit description =Leucine aminopeptidase 2, chloroplast precursor
  Pfam annotation: Domain name=FlaC_arch; Domain location=554-669; Score=-12.4; E_value=0.048; Accession=PF05377.2; Description =Flagella accessory protein C (FlaC)
  Pfam annotation: Domain name=Peptidase_M17; Domain location=170-439; Score=149.8; E_value=7.2e-42; Accession=PF00883.11; Description =Cytosol aminopeptidase family, catalytic domain
  Pfam annotation: Domain name=Peptidase_M17_N; Domain location=41-137; Score=32.7; E_value=1.3e-06; Accession=PF02789.7; Description=Cytosol aminopeptidase family, N-terminal domain
  Pfam annotation: Domain name=RNA_pol_Rpb2_2; Domain location=314-493; Score=198.4; E_value=1.7e-56; Accession=PF04561.5; Description=RNA polymerase Rpb2, domain 2
  Pfam module annotation: Pfam domain module=FlaC_arch::Peptidase _M17::Peptidase_M17_N::RNA_pol_Rpb2_2; Domain location=554-669::170 -439::41-137::314-493
MGHTAAAAAAAAEPALGLTKPNVTFFAKDIEFSEWKGDILAITVTEKDLSKDAYSKFENAVLKKLDGQLGGLLSEAGVEEDFTGKTGQSVVLRLAGQGFKRVGLIGLGQSASSTAAASRGLRTVLGLYEDSRYKSESKKVHLKHVDIIGVGSGAKVDQKLKYANDLSSGVIFGRELVNSPANVLTPDLLPVYLSQSSFVLSAVLAEEASKIASTFSDVFTATVLDVEKCKELKMGSYLGVAAASANPPHFIHLCYKPTDGNVKRKLAIVGKGLTFDSGGYNIKTGPGYSIELMKFDMGGSTAVFGAAKALGQIKPPGVEVHFIIAACENMISGTGMRTGDIVTASNGKTIEGSSGQYVCATLPYIRANIPIIIVFRALGFVADKGILEHICYDFSDTQMMELLRPSLEEAFVIQNQQVALDYIGKHGATVGVTREKRIKYAKEILQKEMLRVGELCETKKTYYFGYIIHRLLMCALSRRAEDDRDHYGNKRLDLAGPLLGGLFRMCVDNGKEVNFQFAIKAKTVTSGLKYSLATGNRGQANQAGTRAGVSQSNEKLQGLREELNAIVPYLEEMRKKKVERWDQFVDVIEQIKKVASEIRPADFVPFRIPVDQSDLSLRKLEELTKELQSLQKEKSDRLKQVMEHLNTLHSLCEVLGVDFKQTVNEVLMWWSYEQQSDVLIESDGANV

SEQ ID NO: 78748 - protein, 136 aa, Zea mays
  Coding DNA Sequence Number=SeqID_36969
  Gene Ontology: Mol. function=catalytic activity
  Homolog annotation: Hit_ID=Q9FL05; Match level="QueryCoverage=89%, HitCoverage=25%, E-value=3e-39, Identity=60%"; Hit description =Similarity to intracellular protein
AVELMLVDALIEANDYLGISLHAHDPEDFWKLDDTIIKTIETAPNNELKKAKEIIQRIRRRELNKFCNPVFCSPKDKLEHFKNITAQDIVCSQKSSEVLLKEEDVAVSNVKIDLTRGKDNPLERFLIFEWIPALIK

SEQ ID NO: 78749 - protein, 462 aa, Zea mays
  Coding DNA Sequence Number=SeqID_36970
  Gene Ontology: Mol. function=nucleotide binding; Cellular component =phragmoplast; Biological process=translation
  Homolog annotation: Hit_ID=Q5N7P7; Match level="QueryCoverage=60%, HitCoverage=39%, E-value=1e-109, Identity=73%"; Hit description =Microtubule-associated protein-like
  Pfam annotation: Domain name=5_nucleotid; Domain location=177-455; Score=-104.0; E_value=7.2e-07; Accession=PF05761.4; Description=5' nucleotidase family
  Pfam annotation: Domain name=MAP65_ASE1; Domain location=1-460; Score= -204.9; E_value=0.01; Accession=PF03999.3; Description=Microtubule associated protein (MAP65ASE1 family)
  Pfam module annotation: Pfam domain module=5_nucleotid::MAP65_ASE1; Domain location=177-455::1-460
MRKKKVERWDQFVDVIEQIKKVASEIRPADFVPFRIHVDQSDQSLRKLEELTKELQSLQKEKSDRLKQVMEHLNTLHSLCEVLGVDFKQTVNEVHPSLGEADESKNLSNCTIESPASATSRLRELKVQRMQKLQDLASSMLELWNLMDTPLEEQQMFQNVTCNIAASEHEITEPNTLSIDFLSYVESEVLRLEQLKASKMKDLVIKKKTELEEHRRRAHLFGEEGYAAEFRDEAIEAAIIFQPILHPLKLQLDDTIIKTIETAPNNELKKAKEIIQRIRRRELYKAGKKLLLITNSDFHYTNKMMNHAFNRFLPNDVGWRDLFEMVIVSTRKPEFLQLSHPLYEVVTDDGLMHPCFKFCNQYSVPKDKLEHFKNITAQDIVCSQKSSEVLLKEEDVAVSNVKIDLTRGKDNPLERFLIFEWVKNVGTHVLKVKNVGTVELIVQSSQTHAGHISSTAMWPRRT

SEQ ID NO: 78750 - protein, 143 aa, Zea mays
  Coding DNA Sequence Number=SeqID_36971
  Subcellular localization annotation: CTP_CleavageSite=24; ConfidenceScore=5.21e-01
MAAQGAGRVVSSSLAKSLGLRKPKRETESGAKNRHQTLSRGPGKGDTPKRILPREGTRLRASLLIRGSKAGPPKGSTAASDLVGPTPTTGQRFEGRPPEGFHGRLRLLGLRAHYRSGVRRLAPEGFTAASDAERGMTMGTFDT

SEQ ID NO: 78751 - protein, 90 aa, Zea mays
  Coding DNA Sequence Number=SeqID_36972
  Subcellular localization annotation: CTP_CleavageSite=66; ConfidenceScore=5.43e-01
MAAQGAGRAVSSSLAKSLGLRKPKREAGSGAKNRHQTLSRGPGKGDTPKRILPREGTRLRASLLIRGSKVGPPKGSTAASDRVGPTPTTG

SEQ ID NO: 78752 - protein, 100 aa, Zea mays
  Coding DNA Sequence Number=SeqID_36973
  Subcellular localization annotation: CTP_CleavageSite=64; ConfidenceScore=5.19e-01
MAAQGAGRAVSSSLAKSLGLRKPKREGPGKGDTPRRILPREGTRLRASRLIRGSKAGPPKGSTTASDRVGPTPTTGQRFEGRPPEGFHGRLRLLGLRAHY

SEQ ID NO: 78753 - protein, 263 aa, Zea mays
  Coding DNA Sequence Number=SeqID_36974
MTNRPESSPPTSSSACTRRPTYSDHHWRRSAYRRDCQDIPYTLYHLTRAISPPNPSPEQIQDCNLADGEYVLIPEKGAIHEEDQEPAPEPAIEDLPAALAIEGKPRYGGYKCGHCTAAAGVSGALYAKAVRFRIWLMPGWRSLDSDTVGFRADDTTEAAAMKTLTTFYGYHPLEMVMHPLGLFPVEKRDDPMWCNRVSHVKDVWAMYPDLVGRITVQCMSALYRLQALQSDAMAHLANLAQTTKLTLDSREDFVVDLSSELVV

SEQ ID NO: 78754 - protein, 131 aa, Zea mays
  Coding DNA Sequence Number=SeqID_36975
MVVGVGRSTRAGGGAHRLRGIWPNQGGTVQLNGSGNFTRDQGSYAREEFGNGSPDCSVYAWPWATEVRLVGFADWIKRYGGVKLGLSHSRTLREDLGFDVSRARVPMPSSGISLHGEVTRVSRMITNGALA

SEQ ID NO: 78755 - protein, 117 aa, Zea mays
  Coding DNA Sequence Number=SeqID_36976
MGQGGSPEIKEGMRARNLRMAHRIARSTRNRGRPKSGKGDPGSPVKFRWVRGLGKLHGPLAKLPERVAQLGSGWREVAAVAEARAVMEGGGELTGVGVLARVMRRSEGQTVAHLGYL

SEQ ID NO: 78756 - protein, 61 aa, Zea mays
  Coding DNA Sequence Number=SeqID_36977
MTETKRGVQKLPREFRSPLEILSIPLFKQLAATKELGFLFDVQGCSWHGKSSNNRSRCNYR

SEQ ID NO: 78757 - protein, 103 aa, Zea mays
  Coding DNA Sequence Number=SeqID_36978
MNINHDATQRTVCCQEEENDENITCSDMTMSMAPAAKVPQESMTETKRGVQKLPREFRSPLELLSIPLFKQLAATKELGFLFDVQGCSWHGKSSNYRSRCNYR

SEQ ID NO: 78758 - protein, 107 aa, Zea mays
  Coding DNA Sequence Number=SeqID_36979
  Subcellular localization annotation: CTP_CleavageSite=38; ConfidenceScore=5.20e-01
MSSSSSSAANAPSAKDTLSDLAAVELQPGHTVEFGVSRISSVPQESMTETKRGVQKLPREFRSPLELLSIPLFKQLAATKELGFLFDVQGCSWHGKSSNNRSRCNYR

SEQ ID NO: 78759 - protein, 159 aa, Zea mays
  Coding DNA Sequence Number=SeqID_36980
MSSGRDLVEEFIGYGVWPLAHGWVLGEVCPRQMPTLGKQLVRSTAFTLDLRDRDLAAFMREVEDGAVRIVGRYALRTETLQSWDIHGSNVRLNRVFELNRLPYGGYPRDDTAAAVDCRGKKPAGVAEEGPSREAAPAIKKRKLGTAAEGLGVSDHFAVD

SEQ ID NO: 78760 - protein, 127 aa, Zea mays
  Coding DNA Sequence Number=SeqID_36981
MDSGTHMMVRTLQTTRVNTNYAPQPRQIPVYPVVVEEAPANLPPVRVENVINLEDSSEEQLPTPTPLAESLAFAAGSSTSASSAPAFQAPAPGGDDPDDSGDGDDEDDDDDDDGEDEHVHEEADYAQ

SEQ ID NO: 78761 - protein, 101 aa, Zea mays
  Coding DNA Sequence Number=SeqID_36982
MKSICDLDKTPGPGRQVKYGNLEFRNAAETAYAGEPSAALSEAISCLDHEPSKVAAMTALKSFLILSIQIQVKYSHSQETGSPTKCKIKIKDMLLRNRKKQ

SEQ ID NO: 78762 - protein, 41 aa, Zea mays
  Coding DNA Sequence Number=SeqID_36983
MKIICDLDKTPGRGRQVKYGNLEFRNAAETAYAGEPSVCVI

SEQ ID NO: 78763 - protein, 298 aa, Zea mays
  Coding DNA Sequence Number=SeqID_36984
MASSGDQSHSAFSPLKEQQQEFVDVSSSERFDIHAFDSPPARRSLRKRAAPSPPQPYTDENRRPAKRRQVSKKGKEKVEDDEVSEALPSNIKDRIIELGFGCVLDLNIDRLDVRVFGSFLMASVKNDDNGPRLVVGNKSLPITPEVVQIVTGLPHDEKQFPDWTYHEIRTARNTFRKLCDDQNMKDMFAHSKCLAAYKKLSSYEVSRWVVERMDNVECPVTRLVGTPRWKFFTSKIMKSICDLDKTPRPGRQVKYGNLEFRNAAETAYAEIYHKGQDLPRPPVFCAARCGVVIPPKGI

SEQ ID NO: 78764 - protein, 120 aa, Zea mays
  Coding DNA Sequence Number=SeqID_36985
MRRWSRGQRRRQLVRPWWQQQQQPRARVVQQVQCSIAIVPLPGQTQEDVSVGSCHAAAPDPEAACGHDEVSGQAAKVASMLLLYEYIFALMEVCDKTNLMFWMVSRFQEKSFTNGRGQLA

SEQ ID NO: 78765 - protein, 154 aa, Zea mays
  Coding DNA Sequence Number=SeqID_36986
  Homolog annotation: Hit_ID=Q5JNC0; Match level="QueryCoverage=26%, HitCoverage=13%, E-value=7e-09, Identity=73%"; Hit description =Putative ubiquinone
MKGESGYYYDYVWRKIKKLAEKLSVWQSAVAFGGQKLPEAETNRDEDGLDHIKGLHVEVEQRTTTMTARLPMVAADHIKAAPDPEAACGHDEVFGQAAKVASMLLLCEYIFALMSRMNGNYTAQEVFIFHPLESGFLNHLSKLFLPRFKVHRPG

SEQ ID NO: 78766 - protein, 201 aa, Zea mays
  Coding DNA Sequence Number=SeqID_36987
MGREAGAPWRLLPLLGVLKGGLLFFPALEGGEEGALGRGRRRAWAPWLRSFSAPRKEGARWREPAELRPSRGIGAWASSAMELLRAGKKKHPAADVVDKGALPWVPCSRDGVLLHPREPRGKNGAVAGWPWLEQRDPRPWSREGVAGGCCCCEEEEAGKKEGGGWEKWRGGSAKLPRAREGVHIYRETLGLGFPSGPNGPS

SEQ ID NO: 78767 - protein, 127 aa, Zea mays
  Coding DNA Sequence Number=SeqID_36988
MGREAGAPWRLLPLLGVLKGGLLFFPALEGFPAHEQRGREWRRGGVGQRKKKGLGAMAEELQRAEEGGGRGGESLQSCDRAEALGPGASSAMELLRAGKKKHPAADVVDKGALPMGALLPRWRAAAS

SEQ ID NO: 78768 - protein, 123 aa, Zea mays
  Coding DNA Sequence Number=SeqID_36989
MAATEGVGQGNCSLRAGEKRLPALNAMEKRGRWAEEEEGLGRHGKGSRGAAREEKGFLLPCLKGAPMGEKGAPWKGARLLELRRRHGSRREVSSATPWRRGARLQGKKTRAREKKLLVAAEKG

SEQ ID NO: 78769 - protein, 253 aa, Zea mays
  Coding DNA Sequence Number=SeqID_36990
  Gene Ontology: Mol. function=mannosyl-oligosaccharide 1,2-alpha -mannosidase activity; Cellular component=membrane; Biological process=metabolic process
  Homolog annotation: Hit_ID=Q9SEH8; Match level="QueryCoverage=69%, HitCoverage=35%, E-value=5e-51, Identity=55%"; Hit description =Mannosyl-oligosaccharide 1,2-alpha-mannosidase
  Pfam annotation: Domain name=Glyco_hydro_47; Domain location=112-253; Score=-235.8; E_value=0.0035; Accession=PF01532.11; Description =Glycosyl hydrolase family 47
  Subcellular localization annotation: CTP_CleavageSite=9; ConfidenceScore=5.41e-01
MWGSGNMCSPSSQSSVIFGCLQPTTAFFTAQSPLQLFSQPQPNQTDPKLLFPYFQSEISRLEDDINRLHDQLRKAGVDLDDNPVVSNKNSRKDLVVEIDPVNNERREKVKEAMLHAWSSYVKYAWGMDELQNGINSFGGLGATLVDSLDTLYIMGLKDEFQKAREVVGGLLSSYDLSGDKVFLDKAKDIIDRLLPAWDTTSGIPYNRINLAHGRALNPGWTNFTRQLLRSISMEDPKVKTVMNILRRKAIELL

SEQ ID NO: 78770 - protein, 84 aa, Zea mays
  Coding DNA Sequence Number=SeqID_36991
  Gene Ontology: Mol. function=mannosyl-oligosaccharide 1,2-alpha -mannosidase activity; Cellular component=membrane; Biological process=ER-associated protein catabolic process
  Homolog annotation: Hit_ID=Q9SEH8; Match level="QueryCoverage=65%, HitCoverage=9%, E-value=6e-21, Identity=82%"; Hit description =Mannosyl-oligosaccharide 1,2-alpha-mannosidase
VVGGLLSSYDLSGDKVFLDKAKDITDRLLPAWDTTSGIPYNRINLAHGRAHNPGWTNAIAEINWYGRSKGEDGYEYFEKAIELL

SEQ ID NO: 78771 - protein, 177 aa, Zea mays
  Coding DNA Sequence Number=SeqID_36992
  Gene Ontology: Mol. function=mannosyl-oligosaccharide 1,2-alpha -mannosidase activity; Cellular component=membrane; Biological process=metabolic process
  Homolog annotation: Hit_ID=Q9SEH8; Match level="QueryCoverage=95%, HitCoverage=33%, E-value=4e-75, Identity=73%"; Hit description =Mannosyl-oligosaccharide 1,2-alpha-mannosidase
  Pfam annotation: Domain name=Glyco_hydro_47; Domain location=2-177; Score=-126.6; E_value=1.1e-08; Accession=PF01532.11; Description =Glycosyl hydrolase family 47
MDELQPQSKNGINSFGGLGATLVDSLDTLYIMGLKDEFQKAREVVGGLLSSYDLSGDKVFLDKAKDITDRLLPAWDTTSGIPYNRINLAHGRAHNPGWTNGDSILADSGTEQLEFIALSQRTGDPKYQQKAENVIKQLQKIYPSDGLLPIYINPHSGTASYSTITFGAMGDRASLET

SEQ ID NO: 78772 - protein, 66 aa, Zea mays
  Coding DNA Sequence Number=SeqID_36993
MAGGKELAGAKEGCLAGDGFELGIKVNTLDLWLKVPTGSDQNHSVKKHKEYEGCRRAEAMRRGASS

SEQ ID NO: 78773 - protein, 59 aa, Zea mays
  Coding DNA Sequence Number=SeqID_36994
MAGGKELAEAKEGWLAGDGFELGIKVNTLDLWLKEVVDNKLRNHRLLVYASDHAFNTFG

SEQ ID NO: 78774 - protein, 90 aa, Zea mays
  Coding DNA Sequence Number=SeqID_36995
MAKLTERLARLGSDWSGLATVAEALAAMAGGKELARAKEGCLAGDGFELGIKVNTLDLWLKGSIRVFVGVAHFAFLKNPFVLNMILSNIS

SEQ ID NO: 78775 - protein, 102 aa, Zea mays
  Coding DNA Sequence Number=SeqID_36996
  Homolog annotation: Hit_ID=Q9FJE0; Match level="QueryCoverage=77%, HitCoverage=21%, E-value=7e-07, Identity=61%"; Hit description =Arabidopsis thaliana genomic DNA, chromosome 5, P1 clone:MMN10
MNSDDRKADEQEDGWLCFYEILANHFVRVSESGMLILELIVQLWSKSFATNIFALLFHKWLFEALLTKKKYRYDIALLLFKVLQMYFVATTVPACVLRMFGI

SEQ ID NO: 78776 - protein, 106 aa, Zea mays
  Coding DNA Sequence Number=SeqID_36997
MMLPINLRLLDRRSGIREQSTETHASPWQLFEAPLDEKEILLRYSSALVQADPLPSSVPSYHRRHEISVMEGQGQHRIYCIFDDAVADIGDGFVWDADSRLYYHAR

SEQ ID NO: 78777 - protein, 553 aa, Zea mays
  Coding DNA Sequence Number=SeqID_36998
  Gene Ontology: Mol. function=binding; Cellular component=clathrin vesicle coat; Biological process=aggregation during fruiting body development
  Homolog annotation: Hit_ID=Q2RBN7; Match level="QueryCoverage=65%, HitCoverage=28%, E-value=1e-147, Identity=88%"; Hit description =Clathrin heavy chain, putative, expressed
  Pfam annotation: Domain name=Clathrin; Domain location=287-428; Score= 131.7; E_value=2e-36; Accession=PF00637.10; Description=Region in Clathrin and VPS
  Pfam annotation: Domain name=Clathrin; Domain location=433-553; Score= 51.5; E_value=2.8e-12; Accession=PF00637.10; Description=Region in Clathrin and VPS
  Pfam annotation: Domain name=Sterol_MT_C; Domain location=133-223; Score=-5.0; E_value=2.6e-07; Accession=PF08498.1; Description=Sterol methyltransferase C-terminal
  Pfam module annotation: Pfam domain module=Clathrin::Clathrin::Sterol_ MT_C; Domain location=287-428::433-553::133-223
  Subcellular localization annotation: CTP_CleavageSite=45; ConfidenceScore=5.21e-01
MATLSSSLCSSFASLRTASIGHPRVITSSTPRIPDYVTIEARDLRVMSGMFFLNMLDSCLKPLLTKKKYRYDIALLLDKVLQMYSSALVQGAPNPRMHQKIEPTRMNLIPSSARMSVSSLLIALDEWCLTDRFDPNNAKHLTAKAEIELGDGLPDIRTTRQCVQAMKDAGFEVVFAKDLAQAFSLPMDPTLAVVAYRRGQCDDELINVTNKNSLFKLQARYVVERMDGDLWDKVLQPENEYRRQLIDQVVSTALPESKSPEQVQNLLILTAKAQLREGLVSEAIESFIRVDDAAHFLDVIRAAKEANVYNDLVKYLLMVRQKAREPKVDGELIFAYAKIDMLSDIEEFILMPNVANLQNVGDRLYDEELYEAAKIIYAFISNWAKLAVTLVKLKLFQGAVEAARKANSAKTWKEVCFACVDAEEFRLAQICGLNIIIQVDDLEEVSEYYQNRGCFNELIALMESGLGLERAHMGIFTELGVLYARYRSEKLMEHIKLFSTRLNIPKLIRACDEQQHWKELTYLYIQYDEFDNAATTIMNHSPDAWDHMQFKDR

SEQ ID NO: 78778 - protein, 74 aa, Zea mays
  Coding DNA Sequence Number=SeqID_36999
  Gene Ontology: Mol. function=transferase activity, transferring glycosyl groups; Biological process=purine ribonucleoside salvage
  Homolog annotation: Hit_ID=Q2V997; Match level="QueryCoverage=93%, HitCoverage=61%, E-value=5e-16, Identity=47%"; Hit description =Adenine phosphoribosyltransferase-like
MASVDTRLVGIASSIRIILDFPSQDITTLRLDPKVFHDTIELFSERYKDQGEVISEENSLEFGTDKIEMHVGAL

SEQ ID NO: 78779 - protein, 114 aa, Zea mays
  Coding DNA Sequence Number=SeqID_37000
  Homolog annotation: Hit_ID=Q43199; Match level="QueryCoverage=42%, HitCoverage=26%, E-value=3e-12, Identity=77%"; Hit description =Adenine phosphoribosyltransferase 1
MEGEIRALLPFNTWQTAIPFHTWRTAIKMMYRGEASNPSPLLGFTDSPQFCSPIRRSSAHLKGEVISEENSLEFGTDKIEMHVGAVQANDRALVVDDLIATSVQLSNLSATTVI

SEQ ID NO: 78780 - protein, 161 aa, Zea mays
  Coding DNA Sequence Number=SeqID_37001
  Homolog annotation: Hit_ID=Q43199; Match level="QueryCoverage=36%, HitCoverage=35%, E-value=2e-12, Identity=63%"; Hit description =Adenine phosphoribosyltransferase 1
MDRGEASNPSPLLGFTDSPPFCSPIRRSSAHLKGEVISEENSLEFGTDKIEMHVGAVQANDRALVVDDLIATRVQLSNLSEMDDEALDQGDGGWIKEMEEVAATATTSRSIMPFRAIQKGKPLSVSLASRRSPPLSSRTPGARRGHKRVVPRRREEEGHVA

SEQ ID NO: 78781 - protein, 259 aa, Zea mays
  Coding DNA Sequence Number=SeqID_37002
  Gene Ontology: Mol. function=nucleic acid binding
  Homolog annotation: Hit_ID=Q84L14; Match level="QueryCoverage=17%, HitCoverage=18%, E-value=1e-17, Identity=93%"; Hit description=Cap -binding protein CBP20
MGYWRSGRSSILAENSLEFGTDKIEMHVGAVQANDRALVVDDLIATRVQLSNLSEMDDEALDQGDGGWIKEMEEVAATGHHFQVGLRLIFFDEYLDVYTCHFFDQYVNEDAMFLSQNSNLIVAVDATEEGLQDSFGTLLLFFRYYSREDAEDAVKYISGTMLDDRPIRVDFDRGFEEGRQWGRGRSDADKTELVPTSPHQLEMGTIEDVRTEPDVSQEQTTKENGSQTTFSYERLISKSTDPVSGIDNKHREVCDSNAH

SEQ ID NO: 78782 - protein, 59 aa, Zea mays
  Coding DNA Sequence Number=SeqID_37003
MGTIEDVRTEPDVSQEQTTKENGSQTTFSYERLISKSTDPVSGIDNKHREAKLFTIKSK

SEQ ID NO: 78783 - protein, 157 aa, Zea mays
  Coding DNA Sequence Number=SeqID_37004
MTRKEKRLAKKEVHLDQREEVISELQGKLNALNKIIEEQQADQAVAVESLQRLQRELDSKARDTALAEEKLKAKADLTRRVKDLAFKKEMLERREKALAEHELEAKEKERTLEERVRQFEVVQAAQAAPGPQAVEVMKKTLEDLQVEQRAGVQRIAA

SEQ ID NO: 78784 - protein, 122 aa, Zea mays
  Coding DNA Sequence Number=SeqID_37005
MEVMQKTLEDLQVEQRVGVQRIAAWAEPPTSISDALPVLDFVADRLRRLDQILGARLEDEGGRLCRAVIEYILTCFWSHDPTISLEPVIAGPVADTEDVAREGVQDTMEVVAERFQRDPADD

SEQ ID NO: 78785 - protein, 268 aa, Zea mays
  Coding DNA Sequence Number=SeqID_37006
  Homolog annotation: Hit_ID=Q8H3V2; Match level="QueryCoverage=24%, HitCoverage=15%, E-value=2e-07, Identity=43%"; Hit description =Putative cis-zeatin O-glucosyltransferase
FRPIHPPLGDYQRPRPSAPLRRPSSTLVCKYLQAGVLVRSWERRHDLTPTVDRFMASEEGTEIRRRVTALGEAVCGAVAEGGLSRQDLQELVAEDGGGPLAAPRSHRAQKGEWVIPSRGRGAGLCRGMMTWRRSSSRPPNGGEATEARVGDAMGRASTSRKELLRRHPSRLDPSVVPPAQTHGMPSCATKPATTPSPPAPRSGLLALGPHCATVYRCQGDAWRVVSPLDLLGEAPTVVGVARDGGGSRGGGHSAKAARPSGQGIVRRR

SEQ ID NO: 78786 - protein, 141 aa, Zea mays
  Coding DNA Sequence Number=SeqID_37007
  Homolog annotation: Hit_ID=Q8H3V2; Match level="QueryCoverage=47%, HitCoverage=15%, E-value=6e-08, Identity=43%"; Hit description =Putative cis-zeatin O-glucosyltransferase
MASPTRASVASPPFGGRDDDLRHVIMPLHNPAPRPRDGITHSPFWARWDLGAARGPPPSSATSSCRSCLDKPPSATAPQTASPSAVTLRRISVPSSDAMNLSTVGVKSWRRSHERTRTPAWRYLHTRVELGRRSGAEGLGR

SEQ ID NO: 78787 - protein, 189 aa, Zea mays
  Coding DNA Sequence Number=SeqID_37008
MEEEDCSLCLWADSLECVLPELVDLSPSVPISLMVDAPDITSSGSVLANLLAVEVVTKTGSLSSNGSPGEVPNHTRHLGEVLAEVHQDEVEEQHEPEQEERMRTTLKTGHSMWVLRDTDCAGMRGGAGHATTEALRTATTPKLDPFVQVPPSRRPGALVGAAPRLDPHGRQVHGIERRDRDPAKGHSAR

SEQ ID NO: 78788 - protein, 52 aa, Zea mays
  Coding DNA Sequence Number=SeqID_37009
MKSLLRSNVKVHNVTIETSLDAPLTDGIVPGPMMFPHVAQLVVNQMQTHTAD

SEQ ID NO: 78789 - protein, 145 aa, Zea mays
  Coding DNA Sequence Number=SeqID_37010
  Homolog annotation: Hit_ID=Q5EUD0; Match level="QueryCoverage=47%, HitCoverage=12%, E-value=4e-26, Identity=88%"; Hit description =Protein disulfide isomerase
MWLLISCIENVELKDAIVTWVRKKTCVPIIRLQSKDSAEEFLKKDMTFVIGLFKNFEGADHEEFVKAATTDNEIFTFAEAYDFEDMESMVEEIGRHSRQSNVKVHNVTIETLLDAPLTDGIVPGPMMFPHVAQLVVNQMQTHTAD

SEQ ID NO: 78790 - protein, 203 aa, Zea mays
  Coding DNA Sequence Number=SeqID_37011
  Gene Ontology: Mol. function=isomerase activity; Biological process =cell redox homeostasis
  Homolog annotation: Hit_ID=Q5EUD0; Match level="QueryCoverage=33%, HitCoverage=12%, E-value=2e-26, Identity=88%"; Hit description =Protein disulfide isomerase
MEIFLFLSTQLRPVDCDVNAMNRVAVYAHVSVLDSNTFFFKKIEVSIPLEYMVTCGYLFPAFKINVGVVVLLLLKHYLLRDAIVTWVRKKTGVPIIRLQSKDSAEEFLKKDMTFVIGLFKNFEGADHEEFVKAATTDNEIFTFAEAYDFEDLESMVEEIGRHSRQSNVKVHNVTIETSLDAPLTDGIVPGPMMFPHVAQLVVN

SEQ ID NO: 78791 - protein, 122 aa, Zea mays
  Coding DNA Sequence Number=SeqID_37012
MDGGRRAVAGPIAAVVEVVIEVFIRLMLRGGFPFVEVHDRLAFVIVAGRVDRGGEREGSGGGGGSGRDAHGPRSLAEQEGTALACGAGGNEGCAVGLWGAGREEQLRSMDGGGSKQRRRDKR

SEQ ID NO: 78792 - protein, 348 aa, Zea mays
  Coding DNA Sequence Number=SeqID_37013
  Subcellular localization annotation: CTP_CleavageSite=65; ConfidenceScore=5.71e-01
MSQWQYRAPVSNSMTANLHRPSICVKSSPFVPSPLLRASSIHRSQLLLSPGSPQSHGTSLVPPCSASERGSLLLRKRARAVRVATTSTTSSTPLPLPSSIYSPSYDDEGEPIVNLDEREPSPEHQPYEDLDDDLDDGGDWTRDRSPTPVHGDDGGARSSSKPRKHILKKSGGVLPPPPSPPRSVNHANHRPTAHPQHPHPVRQIRIPPPSAPPPPPARDLYPVANLAATTLLTLPSSLISTVLPSPFPLIVPPHRACAPTLAAPAPSPGSAVPYCSLLRSCSHLLSLCHNADCHHLRQASTTATSDSGGWGNLFVVVAGSNFAVDIGAALLIHADFAVDIEESQVVCI

SEQ ID NO: 78793 - protein, 348 aa, Zea mays
  Coding DNA Sequence Number=SeqID_37014
  Subcellular localization annotation: CTP_CleavageSite=65; ConfidenceScore=5.71e-01
MSQWQYRAPVSNSMTANLHRPSICVKSSPFVPSPLLRASSIHRSQLLLSPGSPQSHGTSLVPPCSASERGSLLLRKRARAVRVATTSTTSSTPLPLPSSIYSPSYDDEGEPIVNLDEREPSPEHQPYEDLDDDLDDGGDWTRDRSPTPVHGDDGGARSSSKPRKHILKKSGGVLPPPPSPPRSVNHANHRPTAHPQHPHPVRQIRIPPPSAPPPPPARDLDPVANLAATTLLTLPSSLISTVLPSPFPLIVPPHRACAPTLAAPAPSPGSAVPYCSLLRSCSHLLSLCHNADCHHLRQASTTATSDSGGWGNLFVVVAGSNFAVDIGAALLIHADFAVDIEESQVVCI

SEQ ID NO: 78794 - protein, 86 aa, Zea mays
  Coding DNA Sequence Number=SeqID_37015
  Subcellular localization annotation: CTP_CleavageSite=61; ConfidenceScore=5.87e-01
MASSPVLAISPIPLPSPSAYKRTRSSPFFATQLQPPPLPSSLSHSSKHRRAPFTAPGTIIRGTLKAPNSQLVTPINIKLQRPDGCD

SEQ ID NO: 78795 - protein, 146 aa, Zea mays
  Coding DNA Sequence Number=SeqID_37016
MEGGEARPGPVGGELRGGSPPSVQFSGGEVVAKHGRVKWVTRVGRIWPAGAYGGRSTAQSRVPAAAKPPVRFLATIGGAKWCLVIVSVWRSFGHSLIEQRKAREGEGSSPEQSREHGGACLNGSGRRAVGMAGVVWRRWGSGGSFL

SEQ ID NO: 78796 - protein, 103 aa, Zea mays
  Coding DNA Sequence Number=SeqID_37017
MEGGEARPGPVGGELRGGSPPSVQFSGGEVVAKHGRVKWVTRVGRIWPAGAYGGRSTAQSRVPAAAKPPALGGGRGMGETTSTGELAMSAGMVLTPIGTAQAG

SEQ ID NO: 78797 - protein, 263 aa, Zea mays
  Coding DNA Sequence Number=SeqID_37018
  Gene Ontology: Mol. function=helicase activity; Cellular component =DNA replication factor A complex; Biological process=RNA-dependent DNA replication
  Homolog annotation: Hit_ID=Q5NA16; Match level="QueryCoverage=99%, HitCoverage=50%, E-value=8e-31, Identity=30%"; Hit description =Helicase-like protein
MLFTPIAELDPKSTNAAIRVCIIRKWEFRGATNDGPLRHVNLILADEQGTAIHAEIQAALVDDKGSLIQIDKVYELKRFRVTPSRNYYKPVDNSMMIQFTLYTQAKVVEDPPPTFPRYAYKLTSFENIGNNVDNKTYLIDVLGILTEIGSLHHVGYNNSNIIRDIFLKDINNTSTKVTLWRHQASSFSVDNICDDNDNKPVVVLFVGCLAKRFKGSVLNTSKLQLHYLHLQTQYKYVTPNVGEAYLSATAACTWYFNPDIPEA

SEQ ID NO: 78798 - protein, 1369 aa, Zea mays
  Coding DNA Sequence Number=SeqID_37019
  Gene Ontology: Mol. function=helicase activity; Biological process =viral genome replication
  Homolog annotation: Hit_ID=Q5VR06; Match level="QueryCoverage=61%, HitCoverage=59%, E-value=0.0, Identity=50%"; Hit description =Helicase-like protein
  Pfam annotation: Domain name=DUF889; Domain location=503-759; Score =360.6; E_value=2.5e-105; Accession=PF05970.5; Description=Eukaryotic protein of unknown function (DUF889)
MTLLKKYQAHINVEWCNKSIFIKYLFKYVTKGPDRSKLYLKQIIDGQDTPIDEETNTRNEVKEYLDARFICPYDSCWRIFGFEIHRHFPPVERLPVHLPNENYITYHANANMSQILSQEFLRRTMLTEWFVANQRHENARSLTYPDFPSEWRWDEKKRLWEHRQRHGKIGRIHFVHPSAGERYYVRMLLMVVKGAQSYESLRTYNHILHPTFKEACRAHGLLEDDQEWYNAFDEAASWATSNQLRQLFVTMLLFCEVGDELSFFEKVWRLLADDIQYNTRQTLNHPEYQMPDETLKNQLIEELETLFSKRGSRIQDFNLPSRTNSSFQVPTNRLIDDELIYDINAMQSESEMLISRLNNDQLHAFKTITETVLTKRLGFYFVSGYSGTSKTYLWNSIITFLRSRKHIVLSVASSGVASLLLPGGRTAHSRFKIPCELDEGTICDIKRGIMLCELIQSTSLIIWDEALMTHKFAFEALDRSLRDILSSSSPMATNLPFGGKVVVLGGDLRQILPVIEGGNRSQIVNSAIINSSLWSHVHILRLTHNMRLSSTSLSQEDQEELSQFSKWMLNIGEGKIHATSREGEDEPTWIQIPEEFLLMPQGDKTACIVEKVYEDLQTNYMDLQYLKARAILTPTNDVVDSINDYIVSLIPEQTKEYLSCDKVIKAPNTHDSYDLLYPVEFLNTLNGNNFPQHRIVLKKGTPVMLLRNLNQSEGLCNGTRLLLTSLGDKVIEGQIMTGTHKSKNVLIPRVSLTLKNTKWPFVLQRRQYPIKVCYAMTINKSQGQTLSKVGIYLKKPIFTHGQLYVAISRVTSKKGLSILIEDESGNCSSITRNIVYKEVFEQLDPKSTNAAIRVRIIRKWEFRGATNDGPLRHVNLILADEQGTAIHAEIQAALVDDKGSLIQIDKVYELKRFRVTPSRNYYKPVDNSMMIQFTLYTQAKVVEDPPPTFPRYAYKLTSFENIGNNVDNKTYLIDVLGILTEIGSLHHVGYNNSNIIRDIFLKDINNTSTKVTLWGHQASSFSVDNIYDDNDNKPVVVLFVGCLAKRFKGEAYLSATAACTWYFNPDIPEAQVYYSNFHTIAPRIKNYWYAKTLNTVSNAPSLYHASYKMVDGGSHPVSSATSLHPRHLLGTNAHRAMGQKLGSAHRYKLNFIATDGTSEAEFFCFDSIAKRIVGKSCQTLFSTSDVSRGPPPDLAAIISLKFTFVVTINMSAFSVTNRVFSILSVLTSHGRQASIPCATQNLSQQQMLTQDNIIDVTTTQESPATSIAKLSTSTKQESVPRRRLTYSEMLQDTNSPHVLSCSPELLQLNKYLDLGHVTNRQTTGPLKAPVRHPPQRMPRNEVASAIVDEQVSAELNEDSLASPPKKYQS

SEQ ID NO: 78799 - protein, 535 aa, Zea mays
  Coding DNA Sequence Number=SeqID_37020
  Gene Ontology: Mol. function=helicase activity; Cellular component =nucleus; Biological process=DNA replication
  Homolog annotation: Hit_ID=Q5NA16; Match level="QueryCoverage=75%, HitCoverage=90%, E-value=6e-53, Identity=31%"; Hit description =Helicase-like protein
MLFTPIAELDPKSTNAAIRVRIIRKWEFRGATNDGPLRHVNLILADEQGTAIHAEIQAALVDDKGSLIQIDKVYELKRFRVTPSRNYYKPVDNSMMIQFTLYTQAKVVEDPPPTFPRYAYKLTSFENIGNNVDNKTYLIDVLGILTEIGSLHHVGYNNSNIIRDIFLKDINNTSTKVTLWGHQASSFSVDNIYDDNDNKPVVVLFVGCLAKRFKGEAYLSATAACTWYFNPDIPEAQVYYSNFHTIAPRIKNYWYAKTLNTVSNAPSLYHASYKMVDGGSHPVSSATSLHPRHLLGTNAHRAMGQKLGSAHRYKLNFIATDGTSEAEFFCFDSIAKRIVGKSCQTLFSTSDVSRGPPPDLAAIISLKFTFVVTINMSAFSVTNRVFSILSVLTSHGRQASIPCATQNLSQQQMLTQDNIIDVTTTQESPATSIAKLSTSTKQESVPRRRLTYSEMLQDTNSPHVLSCSPELLQLNKYLDLGHVTNRQTTGPLKAPVRHPPQRMPRNEVASAIVDEQVSAELNEDSLASPPKKYQS

SEQ ID NO: 78800 - protein, 180 aa, Zea mays
  Coding DNA Sequence Number=SeqID_37021
MSGDVGIPFLRLLRLEPCSGEAEVFPEAMVEPSLTCATVGGVATCRIHCGAGPRKNDLTIYWALGPFVRSFTLLVDPGDIYPPQAPDLWVYLELRAGLLILSHALEVGTVLAWNDNPWGAPEKLARSYSHYALEVSIMSSIFCFRDVTVLKNILIIPGRLPPMGVGKGRLGTLSVLAGCF

SEQ ID NO: 78801 - protein, 73 aa, Zea mays
  Coding DNA Sequence Number=SeqID_37022
MGCTGGAPNGCSPRPSNGFFKDNPFEEIGMKLFALRFGDVTVLKNILIIPGRPPPMGVGKGRLGTLSVLSGCF

SEQ ID NO: 78802 - protein, 111 aa, Zea mays
  Coding DNA Sequence Number=SeqID_37023
MSLYFAGCLSPGPRKNDLTIYWPPGPFVRSFTLLVDPGDTYPPQAPDLWVNFREIGMKLFALCFGGQDYVINILLQRCDRFEKYTDNSWASPPMGVGKGWLGTLSVLAGCF

SEQ ID NO: 78803 - protein, 325 aa, Zea mays
  Coding DNA Sequence Number=SeqID_37024
  Gene Ontology: Mol. function=translation release factor activity, codon specific; Cellular component=cytoplasm; Biological process =translational termination
  Homolog annotation: Hit_ID=Q8GVY3; Match level="QueryCoverage=60%, HitCoverage=43%, E-value=1e-104, Identity=96%"; Hit description =Putative translation releasing factor2
  Pfam annotation: Domain name=PCRF; Domain location=1-53; Score=9.8; E_ value=7.8e-07; Accession=PF03462.9; Description=PCRF domain
  Pfam annotation: Domain name=RF-1; Domain location=84-197; Score =197.4; E_value=3.4e-56; Accession=PF00472.11; Description=Peptidyl -tRNA hydrolase domain
  Pfam module annotation: Pfam domain module=PCRF::RF-1; Domain location=1-53::84-197
DWADMLLRMYVRWGEKQRYKTRVVEKSPGEQAGIKSATVELEGRYAYGYLSGEKGTHRIVRQSPFNAKGLRQTSFAGVEVMPLLPEESMAVDIPEEDLEISFTRAGGKGGQNVNKVETAVRMVHIPTGIAVRCSEERSQLANKIKALSRLKAKLLVIALEQRASEIKQIRGDIVKAEWGQQIRNYVFHPYKLVKDVRTGRLMRPMRALSPPRIAPPPSSNRASTPSSRRLLPPPLLRTSRSRPPQIVITSLHPRRCRGVDLSRTPAISIPAPSPLPHACSSDLGSRDSPLARPPLVCLVPDFSDRVVKALNLSIIVRDCLRTSPN

SEQ ID NO: 78804 - protein, 311 aa, Zea mays
  Coding DNA Sequence Number=SeqID_37025
  Gene Ontology: Mol. function=translation release factor activity, codon specific; Cellular component=cytoplasm; Biological process =translational termination
  Homolog annotation: Hit_ID=Q8GVY3; Match level="QueryCoverage=73%, HitCoverage=49%, E-value=1e-121, Identity=95%"; Hit description =Putative translation releasing factor2
  Pfam annotation: Domain name=PCRF; Domain location=25-133; Score =32.0; E_value=1.3e-08; Accession=PF03462.9; Description=PCRF domain
  Pfam annotation: Domain name=RF-1; Domain location=164-277; Score =197.4; E_value=3.4e-56; Accession=PF00472.11; Description=Peptidyl -tRNA hydrolase domain
  Pfam module annotation: Pfam domain module=PCRF::RF-1; Domain location=25-133::164-277
  Subcellular localization annotation: CTP_CleavageSite=27; ConfidenceScore=5.04e-01
MAQLSRSSRSIPVLFPCLKLMVFILLVVTKVKTGWRCLVVEQIAGFEFLFQMSSSRPPRRGGDRRDSGKGVPCGLCSYLADWADMLLRMYVRWGEKQRYKTRVVEKSPGEQAGIKSATVELEGRYAYGYLSGEKGTHRIVRQSPFNAKGLRQTSFAGVEVMPLLPEESMAVDIPEEDLEISFTRAGGKGGQNVNKVETAVRMVHIPTGIAVRCSEERSQLANKIKALSRLKAKLLVIALEQRASEIKQIRGDIVKAEWGQQIRNYVFHPYKLVKDVRTGCETSDITGVMDGELDPFIRAYLKYKLTAAATS

SEQ ID NO: 78805 - protein, 559 aa, Zea mays
  Coding DNA Sequence Number=SeqID_37026
  Gene Ontology: Mol. function=translation release factor activity, codon specific; Cellular component=cytoplasm; Biological process =translational termination
  Homolog annotation: Hit_ID=Q8GVY3; Match level="QueryCoverage=68%, HitCoverage=83%, E-value=0.0, Identity=92%"; Hit description =Putative translation releasing factor2
  Pfam annotation: Domain name=PCRF; Domain location=269-381; Score =168.5; E_value=1.7e-47; Accession=PF03462.9; Description=PCRF domain
  Pfam annotation: Domain name=RF-1; Domain location=412-525; Score =197.4; E_value=3.4e-56; Accession=PF00472.11; Description=Peptidyl -tRNA hydrolase domain
  Pfam module annotation: Pfam domain module=PCRF::RF-1; Domain location=269-381::412-525
MALPVDVAGLRPRLGDVEVPPKPRSSLSSMAEAESEPLGRARRRTFGRGQGGVRALGSGEAEAWLPVSLILSRGTAVRVAQAALSFCQAGQWSGEVTAVTSALPGGGLGQAGDVSAVGGGPRARRKSSGLYADGCYQLRIRSLEATSAAGGATFLTWVNTVRSSSSGAGSQSSVADEPEAAEWALQDFYILRKDVELALERVNEVRQSAGLQQLEEDIASLENKSSDSSLWDDPSKAQGILVSLTEVKDKVKLLNDFKLQIEEAETIVKLTEELDSIDTGLLEEASKIIKALNKALDNFEMTQLLSGPYDKEGAVINISAGAGGTDAQDWADMLLRMYVRWGEKQRYKTRVVEKSPGEEAGIKSATVELEGRYAYGYLSGEKGTHRIVRQSPFNAKGLRQTSFAGVEVMPLLPEESMAVDIPEEDLEISFTRAGGKGGQNVNKVETAVRMVHIPTGIAVRCSEERSQLANKIKALSRLKAKLLVIALEQRASEIKQIRGDIVKAEWGQQIRNYVFHPYKLVKDVRTGCETSDITGVMDGELDPFIRAYLKYKLTAAATS

SEQ ID NO: 78806 - protein, 397 aa, Zea mays
  Coding DNA Sequence Number=SeqID_37027
  Gene Ontology: Mol. function=ubiquitin-protein ligase activity; Cellular component=integral to membrane; Biological process =phosphoenolpyruvate-dependent sugar phosphotransferase system
  Homolog annotation: Hit_ID=UPI0000196D5C; Match level="QueryCoverage =94%, HitCoverage=74%, E-value=1e-108, Identity=49%"; Hit description= nucleotide binding
  Pfam annotation: Domain name=WD40; Domain location=100-197; Score =3.3; E_value=15; Accession=PF00400.22; Description=WD domain, G-beta repeat
  Pfam annotation: Domain name=WD40; Domain location=59-96; Score=22.5; E_value=0.0015; Accession=PF00400.22; Description=WD domain, G-beta repeat
  Pfam module annotation: Pfam domain module=WD40::WD40; Domain location=100-197::59-96
MAEEQIEEASMAAAAATPFQLQFDKPIPFQIKMAEWNPEKDLLAMVTDDSKVLLHRFNWQRLWTISPGKCITSICWSPDGKIIALGTEDGLILLHDVENGKMLRTTKSHDVAIVSLNWAEDDPLSKSDKDEFLSYEDRTTRFFPPPPVMPRIGGLRSGDTGLADENEEAIPEFSSASCQRFNILCSGGKDGCVCFSVFGIFPVGKINITKIPINVGSSRKSYQLQDASVSKVSLSRNLQKFVILCFGKLVDTDNLSDSCENSGLHCLYLDTSIFFNRKNELHQVSQQASSIQDMVEVVRASVSLISKQWSNAMSLFHEKFSALPNLISTHGVESSSEDEFLSLLFGTRTSPALHHFLASSLGEAGLKRIAKAVDSAGRDIRGIITEHLQVSYDLLIL

SEQ ID NO: 78807 - protein, 156 aa, Zea mays
  Coding DNA Sequence Number=SeqID_37028
  Homolog annotation: Hit_ID=Q6K8U7; Match level="QueryCoverage=42%, HitCoverage=15%, E-value=1e-33, Identity=95%"; Hit description =Transducin family protein-like
  Pfam annotation: Domain name=WD40; Domain location=84-121; Score =22.5; E_value=0.0015; Accession=PF00400.22; Description=WD domain, G- beta repeat
MAGSRAGSLGCCRRALRASGVPAIVLFKFLRGLSWILLSLCRADRDAVGFSGNLLIKMAEWNPEKDLLAMVTDDSKVLLHRFNWQRLWTISPGKCITSICWSPDGKIIALGTEDGLILLHDVETGPLDHIQVGILQPLLEHLCRFSRPHSSMINFS

SEQ ID NO: 78808 - protein, 144 aa, Zea mays
  Coding DNA Sequence Number=SeqID_37029
  Gene Ontology: Mol. function=inositol or phosphatidylinositol phosphatase activity; Biological process=abscisic acid mediated signaling
  Homolog annotation: Hit_ID=Q6YU97; Match level="QueryCoverage=37%, HitCoverage=9%, E-value=5e-20, Identity=83%"; Hit description =Putative amino acid transport protein
MPKTIYDHDSACFRRNVWLGDLNYRINLPYEKTHELISKQDWNELFGKDQLKVELKKGICLKDGPKGSSTFLQREILESFRDPEFCIGLSTFLYAGAAVTGYKMFGEATESQFTLNLPDNSVISKIAVWTTVANPITKYPWCAN

SEQ ID NO: 78809 - protein, 253 aa, Zea mays
  Coding DNA Sequence Number=SeqID_37030
  Homolog annotation: Hit_ID=Q94LY4; Match level="QueryCoverage=43%, HitCoverage=11%, E-value=8e-41, Identity=73%"; Hit description=Sec31p
MAALVQFIFYHLIHLLSSQDMEKEIRKQVDDAIAKAKLDEASRALLMKVLEDATQDAVQRQAKLKVELKKGHLFEGWTEGVINFCSACFRRNVWLGDLNYRINLPYEKTHELISKQDWNELFGKDQLKVELKKGICLKDGPKGSSTFLQRVHVHNLVIEQSLVSRSTEFEAAIQNGDKSSLRALSDEERETWGFLRVMFEDGDFARTKLLAHLGFEPPQAPPASSTDELSQILADTLNIDHDAVTDNADAQFF

SEQ ID NO: 78810 - protein, 242 aa, Zea mays
  Coding DNA Sequence Number=SeqID_37031
  Gene Ontology: Mol. function=ATP-dependent helicase activity; Cellular component=nucleus; Biological process=ER to Golgi vesicle -mediated transport
  Homolog annotation: Hit_ID=Q94LY4; Match level="QueryCoverage=88%, HitCoverage=20%, E-value=3e-91, Identity=77%"; Hit description=Sec31p
MATKVRYVLCVKKNHKNLCRSDEERETWGFLRVMFEDGDFARTKLLAHLGFEPPQAPPASSTDELSQILADTLNIDHAAVTDNADAQFLIDNGDDFFNNPQPLEASLAEELVSTNGQHIEQEVSGDAVPSDPSIDKSIQHALVVGDYKGAVNQCLASNRMADALVIAHAGGSALWESTRNHYLKNSISPYLKVVSAMVDNDLMSFVSTWPLSSWKETHAHLWTYPLASQHGRWLGVAPDQGY

SEQ ID NO: 78811 - protein, 262 aa, Zea mays
  Coding DNA Sequence Number=SeqID_37032
MSTSPSSHKRGRERDVDAVPSALWVRMDKEFLANQGLLKRAKLLPRLRSAAPSAADKKNCAPALASRRSGAPAVVPSTAPKRETSSQPKAATETADRTRIAAPAANTKQQQSAGAAAKNPIPPAVRPSKNLPPAEAPATANSKQQQQRAGTAAKNPIPPAVRPSKNLPPAEAPAAAKQQHPAVQHAVAAETEKSALPDEMEKSRKEFRRMLEEMEKLALPDQTIYPEDLEELGLTPVEHVVTRTRKQARLEDHAKRFRSLRS

SEQ ID NO: 78812 - protein, 262 aa, Zea mays
  Coding DNA Sequence Number=SeqID_37033
MSTSPSSHKRGRERDVDSVPSALWVRMGKEFLSNQGLLKRAKLLPRLRSAGPSAADKKNCAPALASRRSGAPAVVPSTAPKRETSSQPKAATETADRTRIAAPAANTKQQQSAGAAAKNPIPPAVRPSKNLPPAEAPATANSKQQQQRAGTAAKNPIPPAVRPSKNLPPAEAPAAAKQQHPAVQHAVAAETEKSALPDEMEKSRKEFRRMLEEMEKLALPDQTIYPEDLEELGLTPVEHVVTRTRKQARLEDHAKRFRSLRS

SEQ ID NO: 78813 - protein, 261 aa, Zea mays
  Coding DNA Sequence Number=SeqID_37034
MSTSPSSHKRGRERDVDAVPSALWVRMDKEFLANQGLLKRAKLLPRLRSAAPSAADKKNCAPALASRRSGAPAVVPSTAPKRETSSQPKAATETADRTRIAAPAANTKQQQSAGAAAKNPIPPAVRPSKNLPPAEAPATANSKQQQRAGTAAKNPIPPAVRPSKNLPPAEAPAAAKQQHPAVQHAVAAETEKSALPDEMEKSRKEFRRMLEEMEKLALPDQTIYPEDLEELGLTPVEHVVTRTRKQARLEDHAKRFRSLRS

SEQ ID NO: 78814 - protein, 261 aa, Zea mays
  Coding DNA Sequence Number=SeqID_37035
MSTSPSSHKRGRERDVDAVPSALWVRMDKEFLANQGLLKRAKLLPRLRSAAPSAADKKNCAPALASRRSGAPAVVPSTAPKRETSSQPKAATETADRTRIAAPAANTKQQQSAGAAAKNPIPPAVRPSKNLPPAEAPATANSKQQQRAGTAAKNPIPPAVRPSKNLPPAEAPAAAKQQHPAVQHAVAAETEKSVLPDEMEKSRKEFRRMLEEMEKLALPDQTIYPEDLEELGLTPVEHVVTRTRKQARLEDHAKRFRSLRS

SEQ ID NO: 78815 - protein, 192 aa, Zea mays
  Coding DNA Sequence Number=SeqID_37036
GLSAVVPSTAPERETSSQPKAARETADRTRIAAPAANTKQQQSAGAAAKNPIPPAVRPSKNLPPAEAPATANSKQQQRAGTAAKNPIPPAVRPSKNLPPAEAPAAAKQQHPAVQHAVAAETEKSVLPDEMEKSRKEFRRMLEEMEKLALPDQTIYPEDLEELGLTPVEHVVTRTRKQARLEDHAKRFRSLRS

SEQ ID NO: 78816 - protein, 164 aa, Zea mays
  Coding DNA Sequence Number=SeqID_37037
  Homolog annotation: Hit_ID=Q5G1U0; Match level="QueryCoverage=26%, HitCoverage=6%, E-value=7e-14, Identity=79%"; Hit description=NADP -dependent malic enzyme
ATVQDADRAIQQKNGSPVSVQVKDSDAKDEADEISPAEKHKVFFNTDAICYVEPEQLHLLSNDAKVVEVNVKVESAGTCNVHNNDFYAKEKLLKSMRDCDPSSVRHWILWQWKFQAPLQHYTTLMDLQDRNEKLFYKLLIDNVEELLPIMYTPTAGGSLLFPAL

SEQ ID NO: 78817 - protein, 200 aa, Zea mays
  Coding DNA Sequence Number=SeqID_37038
  Gene Ontology: Mol. function=oxidoreductase activity, acting on the CH-OH group of donors, NAD or NADP as acceptor; Cellular component =chloroplast; Biological process=malate metabolic process
  Homolog annotation: Hit_ID=Q5G1U0; Match level="QueryCoverage=22%, HitCoverage=7%, E-value=1e-14, Identity=80%"; Hit description=NADP -dependent malic enzyme
MTKGSEKSRGFRFVQFATVQDVDRAIQQKNGSPVSVQVKDSDAKDEADEISPAEKHKVFFNTDAICYVEPEQLHLLSNDAKVVEVNVKVESAGTCNVHNNDFYAKEKLLKSMRDCDPSSVRHWILWQWKFQAPLQHYTTLMDLQDRNEKLFYKLLIDNVEELLPIMYTPTAGEAFCFQPFKSEYFTRAASYNVYTSLLNH

SEQ ID NO: 78818 - protein, 75 aa, Zea mays
  Coding DNA Sequence Number=SeqID_37039
  Homolog annotation: Hit_ID=Q10BX7; Match level="QueryCoverage=88%, HitCoverage=6%, E-value=8e-19, Identity=74%"; Hit description=RNA recognition motif family protein, expressed
  Pfam annotation: Domain name=RRM_1; Domain location=1-59; Score=14.0; E_value=0.0072; Accession=PF00076.12; Description=RNA recognition motif. (a.k.a. RRM, RBD, or
MLEAVFSEVDPVWRCFMVVEKGSEKSQGFEFVQFATVQDVGRAIQQKNGSPVFGRKILVKLAMNRAPLGTFAKGE

SEQ ID NO: 78819 - protein, 146 aa, Zea mays
  Coding DNA Sequence Number=SeqID_37040
MKETTLFGRAGGLHTQISTSAGGSKSIDETWWLGAQAASWCSDELISKCSFRTARLTRKPRTAACRRTTACSCDDGMGWPWRPQQVVEGGWEGVAAADGAAAGGGEDNLELIPGVMDLRSMGIAIFSGEVIPLCRRLGSRVAALGA

SEQ ID NO: 78820 - protein, 305 aa, Zea mays
  Coding DNA Sequence Number=SeqID_37041
  Homolog annotation: Hit_ID=O49289; Match level="QueryCoverage=34%, HitCoverage=12%, E-value=7e-13, Identity=37%"; Hit description =Putative DEAD-box ATP-dependent RNA helicase 29
MVRLQATVRGFLVRRAVRKLHLLISSSLHQLAACAPNHQVSSILFEPPAEVEIWVCSPPCTAKEGRLLHLGTCLGVDRPNIRTGWFLLHLSSNVKAAVQLFPWDPEGHEDIAAVQIYILVPQLFCIFVLNNKEVCGKKRKLQSFRDEEYYISSVPQNHHLEAGLSVRDNEGFVENRLDAAVLDLVDDEASGMQAQKTRYHWMKVISQAMFGSEGRRPESKNKVTQYGLDMTEQQYLEHSIPWIAANDAAWRALCHYWASPPPIPTSPSTEHQTPPATLPTHEQEDGLDFVETLFNSGGIDHHSSL

SEQ ID NO: 78821 - protein, 186 aa, Zea mays
  Coding DNA Sequence Number=SeqID_37042
  Gene Ontology: Mol. function=hydrolase activity, acting on acid anhydrides, in phosphorus-containing anhydrides; Cellular component =nucleus
  Homolog annotation: Hit_ID=O49289; Match level="QueryCoverage=56%, HitCoverage=12%, E-value=2e-13, Identity=39%"; Hit description =Putative DEAD-box ATP-dependent RNA helicase 29
VEEVVDISNWEKKEVCGKKRKLQSFRDEEYYISSVPQNHHLEAGLSVRDNEGFVENRLDAAVLDLVDDEASGMQAQKTRYHWMKVISQAMFGSEGRRPESKNKVTQYGLDMTEQQYLEHSIPWIAANDAAWRALCHYWASPPPIPTSPSTEHQTPPATLPTHEQEDGLDFVETLFNSGGIDHHSSL

SEQ ID NO: 78822 - protein, 206 aa, Zea mays
  Coding DNA Sequence Number=SeqID_37043
MRRAATPRWKGQVALAVAVKSLSREAITVVGPSVLVRERVPGSEGVLDRLFRRKVAGGDAHIHGAGLRQEPKAFAEEGVVAGSYKSCNDCCTQKFGSHTRSQLFPKMECFSDLDVNVHLVEVYAGLLRFLPKGMWICYFTCYKKEWLQGSPILLVLDGSDFPTALFLLFQFPSGAKSFCMDLLELFTPHGTVLSVEVYAMLEPDVG

SEQ ID NO: 78823 - protein, 142 aa, Zea mays
  Coding DNA Sequence Number=SeqID_37044
MRRAATPRWKGQVALAVAVKSLSREAITVVGPSVLVRERVSGSEGVLDRLFRWKVAGGDAHIHGAGLRQEPKAFAEEGVVAGSYKSCNDCCTQKFGSHTRSQLFPKMECFSDLDVKYSGYAGLIMLLSLVYAKIRYVEDKKG

SEQ ID NO: 78824 - protein, 599 aa, Zea mays
  Coding DNA Sequence Number=SeqID_37045
  Homolog annotation: Hit_ID=Q6K4V8; Match level="QueryCoverage=34%, HitCoverage=83%, E-value=4e-95, Identity=81%"; Hit description =Putative oligoribonuclease
  Pfam annotation: Domain name=Exonuc_X-T; Domain location=420-584; Score=114.3; E_value=3.5e-31; Accession=PF00929.14; Description =Exonuclease
  Subcellular localization annotation: CTP_CleavageSite=33; ConfidenceScore=5.41e-01
MCASPPATFRRKSRSRTPSDPGTRSRTNTDGPAAVHTTSPKPDYPPRRLPPHSEISQQPRALPVPSTLASLPSLSSSGSTRAGSEGGTEVDWSREGHRHAGLIDVLVIGLSVGGKRGRRGGGSEPWRVGDLRGRKRRRRRASSWEHWEDGIRDDNWTGGYGYPWGFVPRGHGYGLENSPVDPIGSGTRNTSGRFPNRLTLISRPPTRQRPAPSRHPKFPLPSSHPPAANRPARCPAPAPSCAAAPPSCAPAPSPRPELCLRRPSWPELRLRRPRGPSCAAAPPSCAVRRPPLVVPPVARRSAHARPSDQQIDGFTADRPADQRRPSDPQVLSSQYLVRSPMSTPQDSSSRRSGIGAAPADAGSSRDPTPSDAATQGTRNDVVEIDDAAQVGYKNEQNDTTAVNYEEAALVSSSSDYRMPLVWIDLEMTGLDITKDRILEIACIITDGKLTKQIEGPDLVISQSKDCLDNMDEWCKTHHAASGLTERVLQSELSEHDAEAKVLDFVRKHINSGTPLLAGNSVYVDFLFLKKYMPQLAAVFSHVIVDVSSIMALCIRWYPKERKQTPRKQKTHRAMDDIKESIAELKYYKHNIFKPQKSKR

SEQ ID NO: 78825 - protein, 68 aa, Zea mays
  Coding DNA Sequence Number=SeqID_37046
MGLFPVAAMGKQERRNNGCRPWEMTGKIWAPLLGLAAKGDEKAERGFGFHGEEGGELTCCCIGEGRAG

SEQ ID NO: 78826 - protein, 69 aa, Zea mays
  Coding DNA Sequence Number=SeqID_37047
MQGGASPMGLFPVAAMGKQERRNSGCRPWEMTGKIWAPLLGLAAKGDEKAVRGFGFHGEEGGRPRGILG

SEQ ID NO: 78827 - protein, 80 aa, Zea mays
  Coding DNA Sequence Number=SeqID_37048
MEGIEWGKKGEMQGGASPMGLFPVAAMGKQERRNSGCRPWEMTGKIWAPLLGLAAKGDEKAVRGFGFHGEEGGRPQGILG

SEQ ID NO: 78828 - protein, 101 aa, Zea mays
  Coding DNA Sequence Number=SeqID_37049
MSATRRTSQLRYFIHGRDQVGEKQGEMQGGASPMGLFPVAAMRKQKRRNNGCRPWEMTGKIWAPLLGLAAKGDEKAERGFGFHGEEGGELTCCCIGEGRAG

SEQ ID NO: 78829 - protein, 178 aa, Zea mays
  Coding DNA Sequence Number=SeqID_37050
MGLFPVAAMGKQERRNSGCRPWEMTGKIWAPLLGWAAKEDEKAERGFGFHGEEGGDHRAPWDREPSAMGRALRILLQGRRAMATGSGWKKFMGAMNREEALRVCGRGRGELLVAMGGGRKGAVEGASTVERSAAGLLAVDSRCRCHGDLMLRHGARRREHVGRWRRHGSLELSSLLLA

SEQ ID NO: 78830 - protein, 164 aa, Zea mays
  Coding DNA Sequence Number=SeqID_37051
MELAAHDYGDKANGPAIENELGRRWERPSPDLGEAIGNWGSDGLENSLKEREEQWEAAGAMPAPWREAERGAEHRGQRSGQEEIREGARLEEGASCSWPWGEKKGRRRGSFNSGALGCWAARRGQQREAPWLEQRYPRPWRSLCVQGNNRGKKEARPWMLEVLG

SEQ ID NO: 78831 - protein, 148 aa, Zea mays
  Coding DNA Sequence Number=SeqID_37052
  Subcellular localization annotation: CTP_CleavageSite=36; ConfidenceScore=5.15e-01
MPPSLSTARLRLPGISRRASSIFVVVPATPPPKDPRARASTHDIVPPLLSITQAPPSMSPPPPCALDPDLTLVLSTSFPARSRSRFSPPVGTTSSAPTPHLSGAPRSTATVAYAPATPPRDTHPARSSSSTAPPTGRLIQHNVEETRD

SEQ ID NO: 78832 - protein, 814 aa, Zea mays
  Coding DNA Sequence Number=SeqID_37053
  Gene Ontology: Mol. function=oxidoreductase activity; Cellular component=integral to membrane; Biological process=electron transport
  Homolog annotation: Hit_ID=Q53PZ7; Match level="QueryCoverage=60%, HitCoverage=96%, E-value=0.0, Identity=73%"; Hit description =Cytochrome P450
  Pfam annotation: Domain name=p450; Domain location=33-499; Score =71.3; E_value=3.2e-18; Accession=PF00067.12; Description=Cytochrome P450
MEAAADAFPWAAQCAGMALLASSLCVVALALVLLLLRRWPWCSCHVCRAYLTGSWARDFTNLGDWYAHLLRESATGTVHVHVLGCTVTANPANVEYMLKTNFDNFPKGKTFAALLGDLLGRGIFNVDGHAWRHQRKMASLELGSVTVRSYAFGIIAQEVEARLLPLVASAADAGAVVDLQDVFRRFAFDTICKISFGLDPGCLEPEMPMSELADALDTATRLSATRGAAAAPLLWRAKRLLNVGSERELRAAIKLVDELAAAVIRERRKLGVAASGHDLLSRFMASAGADDDDRYLRDIVVSFLLAGRDTVSSALTTLFMLLSENPGVAAAMRAEAGDGGPAPPLTYEHLKRMHYTHAVLYENMRLFPPVQFDSKFCVGPDVLPDGTYVPGGTRVTYHPYAMGRMPRIWGADHGAFRPGRWLTGAGGSFVPESLYKYPVFQAGLRVCLGKELAVTEMKAVAVAVVRAFDVHVVGDSGSAACKPKFVSGLTASISGGAPVSTIRSRPPAARSHPDPARTPNSSRPSFFLPRFHCRQPPDPAAQALLLPRRLEARGRWCSCSTSCFNSNGGSSRRRMRFGGVAAFPAAMGHGQQVDYGEDAGGLGDSDAGGSEPEPPLERTRGGSGGGSKRSRAAEVHNPHSLCSQPLERPPEIRILSAATAAAMDASFTLSYSHHCPNLLSALDLPSGEAGTTSSALTRHPSGAPRSAATVAHAPATPRLCAAPPSPPFPVSPSKQAPAPDLQLVCRFPVSETPRVCNCRRWTMKRWIKEMEEDGRHGRHFQVSTAPPPPFLPPDSISLDPDTSFLGSISEFIDS

SEQ ID NO: 78833 - protein, 87 aa, Zea mays
  Coding DNA Sequence Number=SeqID_37054
MQIIERKCEAQKGAGIRKKTLDKLTDQPGNLIPIDVAEVPDLSASRDNSDLAEVDPCDPTTTSKPEAPMQSLNQLPVVTDLADARSA

SEQ ID NO: 78834 - protein, 88 aa, Zea mays
  Coding DNA Sequence Number=SeqID_37055
MQIIERKCEAQKGAGIRTKKTLDKLTDQPGNLIPIDVAEVPDLSASRDNSDLAEDDPCDPTTTSKPEAPMQSLNQLPVVTDLADARSA

SEQ ID NO: 78835 - protein, 88 aa, Zea mays
  Coding DNA Sequence Number=SeqID_37056
MQIIERRCEAQKGAGIRRKKTLDKLTDQPGNLIPIDVAEVPDLSASRDNSDLAEDDPCDPTTTSKPEAPMQSLNQLPVVTDLADARSA

SEQ ID NO: 78836 - protein, 88 aa, Zea mays
  Coding DNA Sequence Number=SeqID_37057
MQIIERRCEAQKGAGIRRKKTLDKLTDQPGNLIPIDVAEVPDLSASRDNSDLAEDDPCDPTTTSKPKAPMQSLNQLPVVTDLADARSA

SEQ ID NO: 78837 - protein, 87 aa, Zea mays
  Coding DNA Sequence Number=SeqID_37058
MQIIERKCEAQKGTGIRKKTLDKLTDQPGALIPIDVAEVPDLSASRDNSDLAEVDPCDPTTTSKPEAPMQSLNQLPVVTDLADARSA

SEQ ID NO: 78838 - protein, 87 aa, Zea mays
  Coding DNA Sequence Number=SeqID_37059
MQIIERKCEAQKGVGIRKKTLDKLTDQPGNLIPIDVAEVPDISASRDNSDLAEDDPCNPTTTSKPEAPMQSLNQLPVVTDLADARSA

SEQ ID NO: 78839 - protein, 87 aa, Zea mays
  Coding DNA Sequence Number=SeqID_37060
MQIIERKCEAQKGVGIRKKTLDKLTDQPGNLIPIDVAEVPDLSASRDNSDLAEVDPCDPTTTSKLEAPMQSLNQLPVVTDLADARSA

SEQ ID NO: 78840 - protein, 87 aa, Zea mays
  Coding DNA Sequence Number=SeqID_37061
MQIIERKCEAQKGVGIRKKTLDKLTDQPGNLIPIDVAEVPDLSASRDNSDLAEDDPCDPTTTSKPEAPMQSLNQLPVVTDLADARSA

SEQ ID NO: 78841 - protein, 87 aa, Zea mays
  Coding DNA Sequence Number=SeqID_37062
MQIIERKCEAQKGAGIRKKKLDKLTDQPGNLIPIDVAEVPDLSASRDNSDLAEDDPCDPTTTSKPEAPMQSLNQLPVVTDLADARSA

SEQ ID NO: 78842 - protein, 87 aa, Zea mays; identical to SEQ ID NO: 78833
  Coding DNA Sequence Number=SeqID_37063

SEQ ID NO: 78843 - protein, 87 aa, Zea mays; identical to SEQ ID NO: 78833
  Coding DNA Sequence Number=SeqID_37064

SEQ ID NO: 78844 - protein, 182 aa, Zea mays
  Coding DNA Sequence Number=SeqID_37065
  Homolog annotation: Hit_ID=Q5N7K2; Match level="QueryCoverage=45%, HitCoverage=6%, E-value=1e-28, Identity=75%"; Hit description=Zinc finger protein-like
  Pfam annotation: Domain name=Hemerythrin; Domain location=29-90; Score=19.1; E_value=0.016; Accession=PF01814.13; Description =Hemerythrin
MPGSEGTLVAVMPRSPSPTPAGTSATETPVLIFLYFHKAIRAELEALHGAVMLLATERTGDVAALAERCRFFFSIYKHHCDVEDAFLSPPPQQAQPRRSRTQQARRAGGALGLDGIDEDGGSRFGCCSSDVKDPSRVSQLLDADIDAEEDADADDSGVDKDVEHGCESLITSHAAVGGCLFL

SEQ ID NO: 78845 - protein, 209 aa, Zea mays
  Coding DNA Sequence Number=SeqID_37066
  Gene Ontology: Mol. function=zinc ion binding
  Homolog annotation: Hit_ID=Q5N7K2; Match level="QueryCoverage=51%, HitCoverage=8%, E-value=1e-26, Identity=58%"; Hit description=Zinc finger protein-like
MPRSPSPTPAGTSATETPVLIFLYFHKAIRAELEALHGAVMLLATERTGDVAALAERCRFFFSIYKHHCDAEDAETCTTKVLIPYLPYHVRACSLVKYLGQEDLGARFFPSTSLVLMSTVFYEQQHIYCHRCLPSMMPLAHSGVAAGQAQREMGGALCLRRHFATPPTIWESELGFRLGGRGGGRAPWGSREARNGCKQRSKGEGLGFD

SEQ ID NO: 78846 - protein, 252 aa, Zea mays
  Coding DNA Sequence Number=SeqID_37067
  Subcellular localization annotation: CTP_CleavageSite=78; ConfidenceScore=5.48e-01
MSWSSSPVRCALSPVLHRRPPSHDPRIALPLAHQPFPSSMRSATSTLLAATSSAGRAPRQPPPTDCHGLKLCTVRLPRAQAVQRVLHGTALATAPLPLLFITAPNVSSPGAPRACSLEHASQCTGVPWLQRWAPSNPSRPAPAPTPWANLSTHWRAIARPQRRRVVSAEVSISRPIPSPTTSINQTLNLHPLISVCIRFSPHDFPRELGPPPRPPSRNPSSDSHIVGGVAKWRRRQRAPPISLCAWPAATPE

SEQ ID NO: 78847 - protein, 159 aa, Zea mays
  Coding DNA Sequence Number=SeqID_37068
MAASGHEQREKGKKNGAGRGTEMDIPRDKGRPGNTCASTMELDDHGRSLRTSLKGARPWEVGAAAGRRPGEASAQRPKQARWSSRPWKEKGRGAGCPARDEEETGRELRGKQQLGEMEVRVGGIAGEPLAGRWARPGEMAPMPWLEMQPPWEEPERRTA

SEQ ID NO: 78848 - protein, 76 aa, Zea mays
  Coding DNA Sequence Number=SeqID_37069
MEQGPAPWLPAAMSREKRGKRMEQGGAPKWTSPETRAGQGTPARPPWLGKEFREALEGRDAMDRSSTAMGGPCAQA

SEQ ID NO: 78849 - protein, 85 aa, Zea mays
  Coding DNA Sequence Number=SeqID_37070
RAACCAFVEQPAGTTENREEGFNSTTTPAAMGEQRQGASAMAASGHEQREKGKKNGAGRGTEMDIPRDEGRPGNTCASTMVGEGV

SEQ ID NO: 78850 - protein, 124 aa, Zea mays
  Coding DNA Sequence Number=SeqID_37071
  Subcellular localization annotation: CTP_CleavageSite=66; ConfidenceScore=5.61e-01
MAAGVVVELNPSSRFSVVPAGCSANVQQAARCSSSHEIPSVSPASTRSAQRCRSTAAAPCCAVDLRSSTVSASRFAESAQRRRANVGTRGSLEDMVAGVTWPSILPLGGTIEWDPASAEKEHEE

SEQ ID NO: 78851 - protein, 106 aa, Zea mays
  Coding DNA Sequence Number=SeqID_37072
MARRHCADSAKRDAETVELRRSTAQHGAAAVDRHRCADRVDAGDTDGISWLLLQRAACCAFAEQPAGTTENREEGFNSTTTPAAMGEQRQGTDLGLLLRSREKIWA

SEQ ID NO: 78852 - protein, 106 aa, Zea mays
  Coding DNA Sequence Number=SeqID_37073
MSKRQGRRHRRQEKNTSSRVKTLPKNLIRPLPVQDLKGDGFRRPALLVTDALKADQQSSRGRIRPHMLILKVRVQLFIFQSSMDEVAASNSLRTILVQATHTPCVK

SEQ ID NO: 78853 - protein, 115 aa, Zea mays
  Coding DNA Sequence Number=SeqID_37074
MARARISRVDDVEAAGLMISGISEQSREDASQKPYSPSPGTGSRRRRVPETCSPDRKSTSTIGMKRTEGGSDVKRGESENWDDLDADCQAPFIGPSPRTDSYLRSDPPAKISRSV

SEQ ID NO: 78854 - protein, 112 aa, Zea mays
  Coding DNA Sequence Number=SeqID_37075
MAKARINRVGDVEAAGLMISGISEQSHGQSTLDCEEGAIEEGAPAVEAEQADVEEENADEEEEDYSILIPSKPSHLDFEKSTVYEADMAMMIKLGYFREAENRGRNHSNTEG

SEQ ID NO: 78855 - protein, 125 aa, Zea mays
  Coding DNA Sequence Number=SeqID_37076
MRKLELEPWGREGSSLGHLLRHGRKQDAMAGGARGAGSLLLAYSKGAELGWKQPRRELARAVKESSAAWVPGGRSSPQGRLAPWEQLGRELLCAMNRREDGCACGRGGRREWRLEIFEGWEWKIS

SEQ ID NO: 78856 - protein, 334 aa, Zea mays
  Coding DNA Sequence Number=SeqID_37077
MMLGLRKKNSKHSTSVDGVLFTAQKQQTPDERRWRAVHCAAKSSEPRGDVGAAAHFVERLARINGAGAAAHTQEGNRVTRHGRECSAASAAARHGRGLRLRGEAGRAAAVSRHEGEMELSSLFAARRGQQGEEEDPAAVARGRTSKGKEGASAWGIFLGVHGRELLRRHGQGGSAMRKLELEPWEREGSSLGHLLRHGRKQDAMAGGARGAGSLLLAFSKGAELGWKQPRRELARAVKESSAARVPGGRSSPQGRLAPWEQLGRELLCAMSRREEGTGWEKWRRGGTQAGRRGLGVHGCKPCSLLAAVGAREEEGKGMRALAGRRRGRNVVAAR

SEQ ID NO: 78857 - protein, 261 aa, Zea mays
  Coding DNA Sequence Number=SeqID_37078
RKPSHKAWRECSAASAAARHGRGLRLRGEAGRAAAVSRHEGEMELSSLFAARRGQQGEEEDPAAVARGRTSKGKEGASAWGIFLGVHGRELLRRHGQGGSAMRKLELEPWEREGSSLGHLLRHGRKQDAMAGGARGAESLLLAFSKGAELGWKQPRRELARAVKESSAARVPGGRSSPQGRLAPWEQLGRELLCAMSRREEGTGWEKWRRGGTQAGRRGLGVHGCKPCSLLAAVGAREEEGRGMRALAGRRRGRNVVAARG

SEQ ID NO: 78858 - protein, 87 aa, Zea mays
  Coding DNA Sequence Number=SeqID_37079
MATQPPFLSKIAMNDHFQKYQRLTHSDFCPRNGLHQKSKNVIYGKETNANTYEFFDQEMVFTLFFKNVIYGKETYVGVRFMSPLAHE

SEQ ID NO: 78859 - protein, 80 aa, Zea mays
  Coding DNA Sequence Number=SeqID_37080
MGLHQKSKNVIYGQGNICGGEVYEPLVDDKWPHNPHFTENSHERPFSNNTGKANTNRFLTKKWSPLEIQECELWQENICG

SEQ ID NO: 78860 - protein, 192 aa, Zea mays
  Coding DNA Sequence Number=SeqID_37081
MAGRGLRSSTRWARLPLFEHGRGGEDCGASRGRMAVAGGDHGRGARKGDHGGRGGREGQNRAPWWRLRGQGEALAIDTGPHVEEEGRWAAGPHVELLGCTNATHRRWVESSLRVTSWVPVLCYGILNVFSSLATCYRFWNKNKTRRQKFQKCDIVGDEFFLDFSGNFHQCTKDDIKCPFRRASEWLRLWLLA

SEQ ID NO: 78861 - protein, 314 aa, Zea mays
  Coding DNA Sequence Number=SeqID_37082
MAPSGLLFASLTLDPLLPLLYGNDGTRAIEHDLLKKFLEAPLRQAPVHHVRRVPPPTPPSDWCSNIIGNRWLRSLVWWKRRKSGREYENKRRSHRGASRRRRPQCTARCLSSRALTLAAVAVRAVVKRQSPSGTVAHGEADARSERGGSSRGGCGEAADADGQARSRFLRRRCRGAVCGSAVHAGVGTVEVADRWGGGVRRWGRRRPLWLCRALKRGGVAGRWSWRMLFCRGGGCAAEAMDTGPHVEEEGRWAAGPHVEIAGLHWYGICLISTIPVIEKRRNVAYKRCCGSSVAHSNTSGSSATLRYVFLRGAA

SEQ ID NO: 78862 - protein, 107 aa, Zea mays
  Coding DNA Sequence Number=SeqID_37083
MAPSGLLFASLTLDPLLPLLYGNDGTRAIEHDLLKKFLEAPLRQAPVHHVRRVPPPTPPSDWCSNIIGNRWLRVRWGLAGVGDLLHGKDALHAKTSRITMMLGRILL

SEQ ID NO: 78863 - protein, 89 aa, Zea mays
  Coding DNA Sequence Number=SeqID_37084
MSKNTRDTRFIPRFGHTTKVPYFLVEAPTKSRVSFNPNPPFADHKGQAHTIIFAQTERVRQTVCQSDCQTDWQTDLQTGQVDQDRLNRP

SEQ ID NO: 78864 - protein, 100 aa, Zea mays
  Coding DNA Sequence Number=SeqID_37085
  Subcellular localization annotation: CTP_CleavageSite=37; ConfidenceScore=5.02e-01
MVRERRTQTNTMSKNTRDTRFIPRFGHTTKVPYFLVEAPTKSRVSFNPNPPFANHRGQAHTIIFAQTSGLEDGLKGKKVDLDHERLPLHSDERILVRQWG

SEQ ID NO: 78865 - protein, 177 aa, Zea mays
  Coding DNA Sequence Number=SeqID_37086
MGRGPRGSIGSPPERGAEAYTVWSGHVSAPDPCLALTKASELFVPQSRDPAVSGPDPTQRGPRPVPRVQFVPVEALDLARRSGFEVVDLRRALLKIHTPKRYKQIFHAMVRERRTQTNTMSKNTRDTRFIPRFGHTTKVPYFLVEAPTKSRVSFNPNPPFAGHRGQAHTIIFAQTSG

SEQ ID NO: 78866 - protein, 457 aa, Zea mays
  Coding DNA Sequence Number=SeqID_37087
  Gene Ontology: Mol. function=cysteine-type peptidase activity; Biological process=proteolysis
MDRFHQMDWCQLIFNDLCQAAKKWHTRSVTNVSTTIYGCSIVILLYYLDHLHDSAAPQNKRGTPRIKYFDRNIIQALTRADKGKIRKGEEAFGHCSHKTRTNTFDVPRPDPSGQHSIHIELPLIRDLISSKLNQLPSCHRLGFIEKLSHFDSEVGKACSVIKQTLQQIVEKQYNLSDVFGELIDEVLRAEAGDNEDAYDVQKTTSKSDDILPQTAENCPDEADIDPLVHTNITKQNKTPTTSVGKHGDGGKNMPTNTNVTPKATPHMDPDAPIFDATPQIKSTGGVQQAAETDLPDSGPCFDQTPSEHVSVETDPATNTPQVGQASLDSEMQTVLALREYLCGLQSDTGRTIIDYGEYSATCSDIYESFADGKCLDNVFMQCFIQCVIDDAKNQQTSMSSNSLILDVNVGSLLNFEEQEPHSRNPQPFDESVFHTLLNNSLSETDELDQCKAIMVPM

SEQ ID NO: 78867 - protein, 339 aa, Zea mays
  Coding DNA Sequence Number=SeqID_37088
  Gene Ontology: Mol. function=cysteine-type peptidase activity; Biological process=proteolysis
  Homolog annotation: Hit_ID=Q53MK8; Match level="QueryCoverage=64%, HitCoverage=24%, E-value=1e-19, Identity=28%"; Hit description=Ulp1 protease family, C-terminal catalytic domain, putative
  Subcellular localization annotation: CTP_CleavageSite=60; ConfidenceScore=5.44e-01
MKWTVGVVFIALNHPYSRWGVSARNCTGGRSAARARTFLVEVNSVSRTVRRKGPDGPRIVCFSKKLLLSGIIYGTSYMKNVERPPSNLKRIIIQSTQECFSVDIPRVPAESVRHETRQAADEDDDFMPLSKKRNFDDSPPKVLKKIVTKRRKQRLNVRCNPQDVLVSIQILNDRQRQAIARRGFSSILDMRLDALGSRSHLAWLMEKLDHNDMTIRAGPGKELKITKDTVHLILGLPNASGGTTLGIDEAVAANNLRAELGLSKEDFGVAALQDRLRKGSDDDLSIRSFFLILFNRLLFPTASWGITNHVVLLTEEMDRFHQMDWCQLIFNDLCQAAKK

SEQ ID NO: 78868 - protein, 117 aa, Zea mays
  Coding DNA Sequence Number=SeqID_37089
  Homolog annotation: Hit_ID=Q6K9X4; Match level="QueryCoverage=29%, HitCoverage=4%, E-value=5e-07, Identity=77%"; Hit description =Ubiquitin-protein ligase-like
MWRELEHPRTDAAHPFDREPYPDNADRDRERVRQIKGMTEKGMTGARAVARCRPCARRGGTLVSRLSWRGWRRAGGQFTEMEPRRVIRGWRRSMRFAGGGGFRGGGGTGFVAGEARA

SEQ ID NO: 78869 - protein, 760 aa, Zea mays
  Coding DNA Sequence Number=SeqID_37090
  Gene Ontology: Mol. function=metal ion binding
  Homolog annotation: Hit_ID=Q6K9X4; Match level="QueryCoverage=99%, HitCoverage=100%, E-value=0.0, Identity=63%"; Hit description =Ubiquitin-protein ligase-like
  Pfam annotation: Domain name=zf-C3HC4; Domain location=708-746; Score= 8.1; E_value=0.023; Accession=PF00097.15; Description=Zinc finger, C3HC4 type (RING finger)
  Pfam annotation: Domain name=zf-P11; Domain location=707-755; Score =0.9; E_value=0.092; Accession=PF03854.4; Description=P-11 zinc finger
  Pfam module annotation: Pfam domain module=zf-C3HC4::zf-P11; Domain location=708-746::707-755
MDEYHHHHQRMGAAADFRRDLEDLVCDHLGGCFSPAPSSSSSCSAAAGGGAADHEPDGEAESSAVRRRRRESRLLSRWVARQAEEVLSSMEREVERRNREAELLALARLHPVSTLDPSSFLLSSTAAPPPPRPQAPSLNAPSSLLQMWRELEHPRADAAHPFDREPSPDNADRDRERVRQIARRLTDTAAAAATATAGGEWLGETERQRVRLVREWVQMASQPRDSRAGTRRDEPAAGTDRDRRGELEPPRLRGRQARLDVISRMARERQRELQGISGYHVVSEFPRRSRNRIQGLLRGRFLRNGALEEERPPSVAARELGQLRQSHRMPALRPESIASSQDVSQSDASVVESVRLLDNDESQQGAEVAFTDSEDTTQTVLENVDLQEMGADGAEAHSPSIPMDDMVMMQESLTQGDNMQQDGTEDDTGFWQTSLDASLNRWPSEIGGGADRTWEDNAEDLHSETMEEDDREHGHLQEEHDGWHDNESHGTMENWQDDYQDSALDTGPIPRNENRFIPPDDDNVYSMELRELLSRRSVSNLLSNGFGESLERLIRSYVQQRGHGPLNWNLDAAMHPSNGPNANQEQERNPETQQFQAPVNRPALVIPPPPLPPRQPLWHRELRHNNWNSRHREWDAINDLRADMGRLQQGMSSMQRMLEACMDMQLELQRSVRQEVSAALNRFAGPEGLSMDLCDDGSKWNQVRTGTCCVCCDSQIDSLLYRCGHMCTCSKCANELVRSGGKCPLCRAPIVEVVRAYSVM

SEQ ID NO: 78870 - protein, 733 aa, Zea mays
  Coding DNA Sequence Number=SeqID_37091
  Gene Ontology: Mol. function=metal ion binding
  Homolog annotation: Hit_ID=Q6K9X4; Match level="QueryCoverage=95%, HitCoverage=100%, E-value=0.0, Identity=61%"; Hit description =Ubiquitin-protein ligase-like
  Pfam annotation: Domain name=zf-C3HC4; Domain location=647-685; Score= 8.1; E_value=0.023; Accession=PF00097.15; Description=Zinc finger, C3HC4 type (RING finger)
  Pfam annotation: Domain name=zf-P11; Domain location=646-694; Score =0.9; E_value=0.092; Accession=PF03854.4; Description=P-11 zinc finger
  Pfam module annotation: Pfam domain module=zf-C3HC4::zf-P11; Domain location=647-685::646-694
MDEYHHHHQRMGAAADFRRDLEDLVCDHLGGCFSPAPSSSSSCSAAAGGGAADHEPDGEAESSAVRRRRRESRLLSRWVARQAEEMWRELEHPRADAAHPFDREPSPDNADRDRERVRQIARRLTDTAAAAATATAGGEWLGETERQRVRLVREWVQMASQPRDSRAGTRRDEPAAGTDRDRRGELEPPRLRGRQARLDVISRMARERQRELQGISGYHVVSEFPRRSRNRIQGLLRGRFLRNGALEEERPPSVAARELGQLRQSHRMPALRPESIASSQDVSQSDASVVESVRLLDNDESQQGAEVAFTDSEDTTQTVLENVDLQEMGADGAEAHSPSIPMDDMVMMQESLTQGDNMQQDGTEDDTGFWQTSLDASLNRWPSEIGGGADRTWEDNAEDLHSETMEEDDREHGHLQEEHDGWHDNESHGTMENWQDDYQDSALDTGPIPRNENRFIPPDDDNVYSMELRELLSRRSVSNLLSNGFGESLERLIRSYVQQRGHGPLNWNLDAAMHPSNGPNANQEQERNPETQQFQAPVNRPALVIPPPPLPPRQPLWHRELRHNNWNSRHREWDAINDLRADMGRLQQGMSSMQRMLEACMDMQLELQRSVRQEVSAALNRFAGPEGLSMDLCDDGSKWNQVRTGTCCVCCDSQIDSLLYRCGHMCTCSKCANELVRSGGKCPLCRAPIVEVVRAYSVMSNRHGLQDDVRRVCNRNHAGAGPNRRQPHKQEYQ

SEQ ID NO: 78871 - protein, 129 aa, Zea mays
  Coding DNA Sequence Number=SeqID_37092
MSSLKPGPYSRKTPKILLSYILPITLMFILSQTIHSSLFSPTVNFTVLHHIHPATLSLSTHTQHPQPRKTPHPLSYSALPATRIVSLRLQSTLLLSESSCRLVEARSASLRQAVEPEASSASSPSPFVG

SEQ ID NO: 78872 - protein, 58 aa, Zea mays
  Coding DNA Sequence Number=SeqID_37093
MSKPDKTFPLLILPVLPNLHNPEGEGELVELASGSTAWRRLADLASARRHERSDNYAT

SEQ ID NO: 78873 - protein, 392 aa, Zea mays
  Coding DNA Sequence Number=SeqID_37094
  Subcellular localization annotation: CTP_CleavageSite=64; ConfidenceScore=5.31e-01
MNRHQHSRCHYKWNSSSTPAGTNNPPHWRACGATKPQVAHRRLKSSSDNDLRSERPNNSSDDLRADVAAKRPSPTSPLEGRGQAEGCRVGGQSAGGTDYLVGGESSSGCPSRSPARFSPPSNWWSPSWVTTSEGMQPGCLMKILEAERWLKAVADRVFSNTLQGPPPTTWGLGPTRHASWPKAEEAKPPRAVHITAQRLQALLLFRRDQRVKERTAMQAACNRTKGAHPFDFDASSMEAQAHTSCNRRAGYSVRETAPPLAPVPRLLDCGIGAATRGDPAHGPIVPTEHIGHGSVSRGRRRDGRYGQKWAGSNGGGRRAEEAVKSSASSRPLLGQRESPFPRREDDAPVFRSSNGSRTRNGCPANHSSHRINSTAGQAAPLAGEAGDASPMP

SEQ ID NO: 78874 - protein, 392 aa, Zea mays; identical to SEQ ID NO: 78873
  Coding DNA Sequence Number=SeqID_37095
  Subcellular localization annotation: CTP_CleavageSite=64; ConfidenceScore=5.31e-01

SEQ ID NO: 78875 - protein, 243 aa, Zea mays
  Coding DNA Sequence Number=SeqID_37096
  Homolog annotation: Hit_ID=Q6QP51; Match level="QueryCoverage=62%, HitCoverage=70%, E-value=2e-14, Identity=46%"; Hit description =Putative growth-regulating factor 1
MAVAGGRKQQSSRQQAHVPSWDSERTLSHGDRRHLWQAKQVTLHLRHDDRVKKGTGKGDTPKGILLREGNGPRAPLLIRGSKAGPSEGFNSRLRALGLRAHYWSEVRRLAPRKGSTAASGHSGFAPTTDQGFVGWPPKGSDSLLRARRARDDPGYVRYITKARATLPRLGGCSRKPGFGQTVDSVNIPARELGTRLSRLSPLKGHDLASPEPSLGQWQPTSEDSRLARGPPQSDGHTFGSPEA

SEQ ID NO: 78876 - protein, 118 aa, Zea mays
  Coding DNA Sequence Number=SeqID_37097
MAAALCVRAARGRESLLGANGGEGEGEWGSGLKWPGARWGEFHARRGREEGGREQLGGGYARKTGLTARAREQRESEGASARGESGRRQVGPGEQREKGAGMKWATFVKRSTTTQMES

SEQ ID NO: 78877 - protein, 182 aa, Zea mays
  Coding DNA Sequence Number=SeqID_37098
MAVALCVRAARGRERVYWAQMGGEGEGEWGSGLKWLGARWGEFHARRGRGEGGREQLGGGYARKTGLTARAREQRESEGASARGESGRRQVGPGEQREKGAAQMGWREMEHKGGEPRLVLSCARGDALAVGVTSVREGERERVSLFVSPSSRATTPSHEGPGPSFYRCKERVQVYNGGVAIH

SEQ ID NO: 78878 - protein, 341 aa, Zea mays
  Coding DNA Sequence Number=SeqID_37099
IGLGQIKTRPPDLGWTVGIGWPAWASPTASWGGGARPRGGGLAGDEGHGRLAGPWGHPSGRGGRGGRGEFSGRVWVGAEAPEGGDSRRGGSAAGFLYSGEQSHATESKTKGNRGGRGPLPQGGLRGLLGGDGDATETRVDGGGCTANDGEGERESTGAQMGGEGEGEWGSGLKWPGARWGEFHARRGRGEGGREQLGGGYARKTGLTARAREQRESEGASARGESGRRQVGPGEQREKGAGFLYDWDGARADVAACFTGSAHLCDYVSMQVWVEPSATKDMMDKVEQVRQRRKAEKSLLSLQRRLATTSAEELENSGCQKTYASPRKSGEASFANASMMDM

SEQ ID NO: 78879 - protein, 71 aa, Zea mays
  Coding DNA Sequence Number=SeqID_37100
MDKVEQVRQRRKAEKSLLSLQRRLATTSAEELENSGCQKTYASPGKSGEASFANASMMDMQKLKLADNRVL

SEQ ID NO: 78880 - protein, 168 aa, Zea mays
  Coding DNA Sequence Number=SeqID_37101
MQIIERKCEAQKGAGIRSNLNFYVVLWTVGKKTLDKLTDQPGNLIPIDVAEVPDLSASRDNSDLAEDDPCDPTTTSKPKAPMQSLNQLPVFNSLARARVTGPGGRGGAWTGEDGAWAGEGAAGVDVLVLVLMSSSDWACSLRKTKKWFPVTITRALYAPRHPFSEWVT

SEQ ID NO: 78881 - protein, 154 aa, Zea mays
  Coding DNA Sequence Number=SeqID_37102
MQIIERKCEAQKGAGIRSNLNFYVVLWTVGKKTLDKLTDQPRNLLPIDVAEVPDLSASRDNSDLAEVDPCDPTTTSKPEAPMQSLNQLPVFNSLARARVTGPGGRGGAWTGEDGAWAGEGAAGVDVLVLVLMSSSVPVAKTGALDAPDNHFRNG

SEQ ID NO: 78882 - protein, 142 aa, Zea mays
  Coding DNA Sequence Number=SeqID_37103
MQIIERKCEAQKCAGIRSNLNFYVVLWTVGKKTLDKLTDQPGNLIPIDVAEVPDLSASRDNSDLAEVDPCDPTTTSKPEAPMQSLNQLPVFNSLARARVTGPGGRGGAWTGEDGARAGEGAAGVDVLVLVLMSSSNGTPLAD

SEQ ID NO: 78883 - protein, 71 aa, Zea mays
  Coding DNA Sequence Number=SeqID_37104
MAVVGALQRGSGAVVLVRMEAGTRAGARVSAGVDDPDVCGLRFQESLPLCMLVPGFKGKLPGIFLGKALFS

SEQ ID NO: 78884 - protein, 66 aa, Zea mays
  Coding DNA Sequence Number=SeqID_37105
  Subcellular localization annotation: CTP_CleavageSite=25; ConfidenceScore=5.26e-01
MEAATLAGGGGTGEWGSMTLMFVVSGSKNFCLSVCLFQASRVSFPVSSWGSSQSEEKLHYPMHAED

SEQ ID NO: 78885 - protein, 90 aa, Zea mays
  Coding DNA Sequence Number=SeqID_37106
  Subcellular localization annotation: CTP_CleavageSite=82; ConfidenceScore=5.60e-01
MTLMFVVSGSKNLCLCVCLFQASRVSFPVSSWGSSQSEENFTTQCMQRTGHTNFRPGNFSSGKACTQLQSETSPGWVKRELMLMTSSGGD

SEQ ID NO: 78886 - protein, 149 aa, Zea mays
  Coding DNA Sequence Number=SeqID_37107
MGSKTLSTECTFASLIRLRKKTLKDMLAFGNLGKAFQESKTLFAEKLTMSGSESTDTPPSSLLPRRVHATLAISPLPLRGGLSGIGPTEAKLTHDEAHGQLKGPRTRSPTKDDGATTPPNLYRPLYPIIPARICSIHNSTLGAPLGINN

SEQ ID NO: 78887 - protein, 112 aa, Zea mays
  Coding DNA Sequence Number=SeqID_37108
MMKYLQQHGFENPEYEVYFLKSYPSKENTLKDMLAFGNQGFSRPEWVHANREHRYTTVQPLATEGTRYFAISPLPLRGGLSGIGLTEAKLTHDEAYGQLKGPRSASLHQLGP

SEQ ID NO: 78888 - protein, 200 aa, Zea mays
  Coding DNA Sequence Number=SeqID_37109
  Gene Ontology: Mol. function=phosphoenolpyruvate carboxykinase (ATP) activity; Biological process=gluconeogenesis
MESRIERIERGERKSPTGYYRVCFPLPPGWDPKDLQNILSKLCDQYQYCLYCGCKVLFHLSSISCTYVQDGVIGSSAEWDAKVRGISDNPSAIMLLSNVLWKIPDRAISHDTSPLTIYATSSISYCERCTYWLTAMTDSILFERGGLPAPGWILGFGGSTVSLFAQVEIMMSCLEIHNALLSIDYGAVISSNRSTVCRVQ

SEQ ID NO: 78889 - protein, 89 aa, Zea mays
  Coding DNA Sequence Number=SeqID_37110
  Gene Ontology: Mol. function=phosphoenolpyruvate carboxykinase (ATP) activity; Biological process=gluconeogenesis
MAPLVPRQNGMQSYCERCTYWLTAMTDPILFERGGLPTPGWILGFGGSTVSLFAQVEIMMSCLEIHSALLSIDYGAVISSNRSTLCRVQ

SEQ ID NO: 78890 - protein, 89 aa, Zea mays
  Coding DNA Sequence Number=SeqID_37111
  Gene Ontology: Mol. function=phosphoenolpyruvate carboxykinase (ATP) activity; Biological process=gluconeogenesis
MAPLVPRQNGMQSYCERCTYWLTAMTDPILFERGGLPAPGWILGFGGSTVSFFAQVEIMMSCLEIHNALLSIDYGAVISSNRSTVCRVQ

SEQ ID NO: 78891 - protein, 89 aa, Zea mays
  Coding DNA Sequence Number=SeqID_37112
  Gene Ontology: Mol. function=phosphoenolpyruvate carboxykinase (ATP) activity; Biological process=gluconeogenesis
MAPLVPRQNGMQSYCERCTYWLTAMTDLILFERGGLPAPGWIMGFGGSTVSLFAQVEIMMSCLEIHNALLSIDYGAVISSNRSTLCRVQ

SEQ ID NO: 78892 - protein, 227 aa, Zea mays
  Coding DNA Sequence Number=SeqID_37113
  Gene Ontology: Mol. function=phosphoenolpyruvate carboxykinase (ATP) activity; Biological process=gluconeogenesis
MWEDHVSDGLRSAIPLCDELFDYLLILIPVLMLNASLGSIPYWFSYLRKHKEEEDVITEEDLQNILSKLCDQYQYCLYCGCKVLFHLSSISCTYVQDGVIGSSAEWDAKVRGISDNPSAIMLLSNVLWKIPDRAISHDTSPLTIYATSSISYCERCTYWLTAMTDSILFERGGLPAPGWILGFGGSTVSLFAQVEIMMSCLEIHNALLSIDYGAVISSNRSTVCRVQ

SEQ ID NO: 78893 - protein, 49 aa, Zea mays
  Coding DNA Sequence Number=SeqID_37114
MAHARTRDDQVRTEQNALIQKDGLRSLPCSTGSIADIQIENTVGKHWYM

SEQ ID NO: 78894 - protein, 48 aa, Zea mays
  Coding DNA Sequence Number=SeqID_37115
MAHARTRDDQVRTEQNALIQKDGLRSLPCSTGSIADIQIENTVPSESH

SEQ ID NO: 78895 - protein, 84 aa, Zea mays
  Coding DNA Sequence Number=SeqID_37116
MAGRRCPRVSFYMPLVPNLNDPDGYGVCMVRDRLWSSASTAPDCPSPWRKTVGARAMPRNINLDLYISYASCGARKRTQANLLY

SEQ ID NO: 78896 - protein, 102 aa, Zea mays
  Coding DNA Sequence Number=SeqID_37117
MTHRIAQSTRAGGRPKSGEDDLGFPVKFCRVRELGKLHKLLVKLSERLARLGSDRGGLATMAEARVAMVGGRELAGAKEVRLAGEGIELGIKVNTLGLWLKG

SEQ ID NO: 78897 - protein, 66 aa, Zea mays
  Coding DNA Sequence Number=SeqID_37118
MASPLQSLPSRASRSVGLLAVDELPCLRTWTDRLRPSPTAAAHRRDPQDLPYTLGHLTGAVSPPRT

SEQ ID NO: 78898 - protein, 427 aa, Zea mays
  Coding DNA Sequence Number=SeqID_37119
  Pfam annotation: Domain name=SlyX; Domain location=337-404; Score= -10.3; E_value=0.091; Accession=PF04102.3; Description=SlyX
  Subcellular localization annotation: CTP_CleavageSite=53; ConfidenceScore=5.18e-01
MAIISKIWSQSALELDLSLSCLVLDAMPGARARTSVRPRMPRARVKALPSAVLARAYKASLGAPHLAPCSPSLARRPSLAPLVKLPKLSDPAELHRRTKIVLAGLRPPACARRPSNPVGLLAVDELPCLRTWTDRLRPSPTAAAHRRDPQDLPYTLGHLTGAVSPPMNSPTPASGGDTRSSSDFLSHDGFPSILWEVLNSAGYPTPPLYMVQLYEEHRVPCCRVWLTLEAHPLQPGWRSLDSETVGFRTDDTTEAAAMKTLTTFCGYHPLEMVMHHLGLFPAEKKDDPMWCNRALQSNAMAHLANIAQITKLTLDSREDFVVDLSSELVEKDLQVERLSQRITTLEQQVEIRDNTIDVLENQLHDVQRELKEANDHLDMHHLEMEANEAGSEGEEAPEELGPAPGANGTTSAIPPSPASSVASTTQG

SEQ ID NO: 78899 - protein, 47 aa, Zea mays
  Coding DNA Sequence Number=SeqID_37120
MGDNLGFGYFKARDIMGQRTLAFTRVLLRDVSCKTLGNHGLLVVYAK

SEQ ID NO: 78900 - protein, 103 aa, Zea mays
  Coding DNA Sequence Number=SeqID_37121
MERPPRKTVLPQGWYGTPLADYLGKLVDDYLTRKGKGSRGVRYTSHELPPLMSTDCNGDNLGFGYFKARDIMGQRTLAFTRVLLRDVSCKTLGNHGLLVVYAK

SEQ ID NO: 78901 - protein, 273 aa, Zea mays
  Coding DNA Sequence Number=SeqID_37122
  Homolog annotation: Hit_ID=Q6QP51; Match level="QueryCoverage=25%, HitCoverage=30%, E-value=5e-09, Identity=57%"; Hit description =Putative growth-regulating factor 1
RRWAESSPTRSKVLPYGAGAGSTRHASWPRAEEAKPPRAVHATAQRLRAFLHFRPDQRAKGRAAMQAACNRAPPTSNAPSMGAHAHASCNRRAGRYVQATAPPLAPLPRLLDCGTSTATRGDPAYDPSVPARRDGQYGQKWAGSNGGGGASGRGSERRFAFAIMTASKKGPGKGDTPKRILLREGNRLRASLLIRGSKAGPSEGFNIRLRARGLHTHYWSEVRRPAPRKGSTVASGHSGSAPTTDQGFVGWPSKGSQRPPGKTVLPQGWYGTP

SEQ ID NO: 78902 - protein, 94 aa, Zea mays
  Coding DNA Sequence Number=SeqID_37123
MWLRRVAARASRSELARPKLSSENTWTRWGLAVLVGKIGGAGPFAAAARREIAGSAELEQSAHEEHGRRKEGSQRHGEEGRGKGGGQGIGKGLQ

SEQ ID NO: 78903 - protein, 112 aa, Zea mays
  Coding DNA Sequence Number=SeqID_37124
MGKKAVGREEGRASARGFNRGAPWEHFTQRPLQGGGGSRHGKGSRGAARGEEGFLLPCLKGAPRGEKGAPWEGARRPWSFCAGCCVRKKKAGKRKWRLGKMEGWECKNVKCK

SEQ ID NO: 78904 - protein, 140 aa, Zea mays
  Coding DNA Sequence Number=SeqID_37125
MGKKAVGREEGRASARGFNRGAPWEHFTQRPLQGGGGSRHGKGSRGAARGEEGFLLPCLKGHKGEKGRPWEGARRPMELLRWLLREEEEGREKEVAARKNGGVGVQKCQMQVKGTSIYRHGLGLGFLSGPIGLGWAGPKC

SEQ ID NO: 78905 - protein, 66 aa, Zea mays
  Coding DNA Sequence Number=SeqID_37126
  Subcellular localization annotation: CTP_CleavageSite=42; ConfidenceScore=5.24e-01
MAHFLSLLSMAPISSRVLLAAPLLHFFSLCSLCDPLATSSTLATVKVALRALQFDEMLSHVDSPCG

SEQ ID NO: 78906 - protein, 87 aa, Zea mays
  Coding DNA Sequence Number=SeqID_37127
MDLLLLSFPPKQQAPTASRVFDLMPAKEMCCCSPVDAHRVFAVFGPDPLATSSTLATVKVALRALQFDEMPSHVDHAAKSRLVQVES

SEQ ID NO: 78907 - protein, 90 aa, Zea mays
  Coding DNA Sequence Number=SeqID_37128
MVELTPSLLQPLPLLLFVVRRVFDLMPAKEMCCCSPVDAHRVFAVFGPDPLATSSTLATVKVALRALQFDEMPSHVDHAAKSRLVQVESM

SEQ ID NO: 78908 - protein, 66 aa, Zea mays
  Coding DNA Sequence Number=SeqID_37129
MGSGRSASSAKVGCRGSFDLVLLVTQLWEAGKGSRLMGKVCDLCRGLETDISAVLTVKSNLGILFD

SEQ ID NO: 78909 - protein, 71 aa, Zea mays
  Coding DNA Sequence Number=SeqID_37130
MEIGSFWVEWESQLVGKVCDLSRLLETDISAVLKDDSQDLRALALYFLTFHRNNKALPLPVDIQRFKFAHK

SEQ ID NO: 78910 - protein, 78 aa, Zea mays
  Coding DNA Sequence Number=SeqID_37131
MDFKITKGTSVLERRIPRSLITVSTADISVSNTLQRSHTLPTNCDSHSTRKEPISIDHYLGGLARYHYVAFTKISQRS

SEQ ID NO: 78911 - protein, 124 aa, Zea mays
  Coding DNA Sequence Number=SeqID_37132
  Subcellular localization annotation: CTP_CleavageSite=32; ConfidenceScore=5.04e-01
MARASVKPAAPGASMPPPAAPTHERRPPSPPRAAEAAVAGAEVSMDIFVDHYLVGGVAMFDAHTGLDPAGPPDPALFRSRFGSGGAIRASFVCPPFSCGVSPRAPARCRVSLSPAHPLHGNEGR

SEQ ID NO: 78912 - protein, 451 aa, Zea mays
  Coding DNA Sequence Number=SeqID_37133
MDISVDDYLVGGVPMFDAQTGLGPARAESEQLAVVPVAVAAGPVAVATLVKGSSQDPWSKFCAGGEIASAAAAKDVATSVAQHLKHSLCQAVAFAECIASRVLTSEFSAERRRLEGRIERLRMQHTEAIQDKSAAESRSRNLLEKLTATEADKEDLNRWLAAEREDAEKARAEAQATRTEASLALKCATNAELGLRSLHGYVDRVEAFTRTGVDRAHALLVDAYRQLGARTAPFDKSGEEVGLRFLEWLQEELEFLLSIVTGLMSFASLITCEGLRMPCPMLNEEEVEDFGGLESSVTRAEDERTGAEEQSVPQADPRGDPAAAATLAGEDPATVAAPSQVPTSGPAQATPTDVDINFVVAANAVPVNGNSSGSETESWSSEGVTPQVLPWLEHTLVLRTVITCDCNLADEEYVLVPEQGAAQEVAPDPAPEPAPEDLPVTALEGKPRFYA

SEQ ID NO: 78913 - protein, 174 aa, Zea mays
  Coding DNA Sequence Number=SeqID_37134
MERIGEARERDATALWGTTRAVSGFLLAREEGERRHTTFFGDVGARSSGGGGFGGIGAAHRQLLGEDEQEASLVGPKAREMAGRALHASAACSRSNQPAGRLGQDGVTDLTPLTGISPSRFKERLARTTRYLKPIDAILEDLSDLWVRTHTCFFRATLILLVDVDHIVFIGVTG

SEQ ID NO: 78914 - protein, 112 aa, Zea mays
  Coding DNA Sequence Number=SeqID_37135
MERIGEARERDAAALWGTTRAVSGFLLAREEGERRHTTFFGDVGARSSGGGGFGGIGAAHRQLLGEDEQEASLVGPKAREMAGRALHASAACSRSNQPAGRLGQDVRAGLRA

SEQ ID NO: 78915 - protein, 125 aa, Zea mays
  Coding DNA Sequence Number=SeqID_37136
MERIGEARERDAAALWGTTRAVSGFLLAREEGERRHTTFFGDVGARSSGGGGFGGIGAAHRQLLGEDEQEASLVGPKAREMAGQALHASAACSRSNQPAGRLGQDVRSHCVRDARGEERGWNESS

SEQ ID NO: 78916 - protein, 255 aa, Zea mays
  Coding DNA Sequence Number=SeqID_37137
  Subcellular localization annotation: CTP_CleavageSite=35; ConfidenceScore=5.39e-01
MARARAYKTLPDFDCTLPRTLKPHRSLARRRLPVRSVSAAAQSLCHRRPANRAIPNPVQPSEKTVHTSVKLPERGIGVCFAGEASPRSSELSTPPEYVDRVIHSTILRFIVHTVPTLPYEAHRALGLNQFAVVWPVHSPPTRTPACARGPGDSGHPRYQAVPRRDRQSLPEPTPPFAGPPSPPIKENRKRGINNEPESTPIFVRILIQDCNLADGEYILVPEQGAAQEVAPDPAPEPAPEDLSATALEGKPRFYA

SEQ ID NO: 78917 - protein, 168 aa, Zea mays
  Coding DNA Sequence Number=SeqID_37138
  Subcellular localization annotation: CTP_CleavageSite=79; ConfidenceScore=5.44e-01
MARARAYKALPGFDCTLPRTLKPHRSLARCRLPVRSVSAAAQSLCHRRPANRAIPNSVQPSEKTVHTSVKLPERGIGVCFAGEASPRSPELSTPPEIKENRKRGINNEPESTPIFVRILIQDCNLADGEYIVVPEQGAAQEVAPDPAPEPAPEDLSATALEGKPQFYA

SEQ ID NO: 78918 - protein, 170 aa, Zea mays
  Coding DNA Sequence Number=SeqID_37139
  Subcellular localization annotation: CTP_CleavageSite=35; ConfidenceScore=5.53e-01
MARARAYKALPGFDCTLPRTLKPHRSLARRRLPVRSVSTAAQSLCHRRPANRAIPNSVQPSEKTVHTFVKLPEIKENRKRGINNEPESTPIFVRILIQDCNLADGEYILVPEQGAAQEVAPDPAPEPAPEDLSATALEGKPRFYAYPVIYAILLHLMIVGLIVHLGVGIV

SEQ ID NO: 78919 - protein, 67 aa, Zea mays
  Coding DNA Sequence Number=SeqID_37140
MAPQASGAPRVVWLARGPTMSAQYHGEQGRAQVGPCGYVIVDITPQLITLNQRSKSNKYHKNKHSCA

SEQ ID NO: 78920 - protein, 176 aa, Zea mays
  Coding DNA Sequence Number=SeqID_37141
MAHGGSGSTEVLRRAIRPPLEDILARKDHGDMREPAWLRSRRMRWLQQLNPRSWGGFVKIPWISRVSIHGRVHRGEEVPDDTGPDVSGNGARTGFLAGRAHTAVKQTRVGGWRGFGLRACGKRKEEWAEEEVSGPPGRLKSLARLKLWGYATIGWSRCVCGHYSTTNHTQSKIQVS

SEQ ID NO: 78921 - protein, 142 aa, Zea mays
  Coding DNA Sequence Number=SeqID_37142
MAHGGSGSTEVLRRAIRPPLEDILAWKDHGDMREPTWLRSRRMRWLQQLNPRSWGGFVKIPWISRVSIHGRVHRGEEVPDDTGPDVSGNGARTGFLAGRARTAVKQTRVGGWRGFGLRACGKRKEEWAEEEVSGPPVLEIQL

SEQ ID NO: 78922 - protein, 58 aa, Zea mays
  Coding DNA Sequence Number=SeqID_37143
MDVFLPALRGKGSAQASDRTQSSGNGEGAATAETELHGPPSSMRSLNSLSVRRWWPSP

SEQ ID NO: 78923 - protein, 341 aa, Zea mays
  Coding DNA Sequence Number=SeqID_37144
MVAQPLILIPRLGGVGPGRSGFPWTGMHPEPLDPRSAVHDLKRHDPNAVRPISSQRLRSKRAKGYPYDLISTVDDQINGDRASSSSHQPSRVLRRRRAVEMNGCDPNRPPPSTIVKLNEATRCARHHGHNGCILTGIKVWMKLGHGAVRIHGGDELRRAIAAHWPSNPTRDRFLHLRRNPPMLSVRTAAAKESTAAASTAAARRVSGGGDFCSGGKGLRKPLTGPKVPATAREQLRRKLSFTALHPQCALSTLSRFGDGGPALDSYTQVGGGRTRQVRRVVARTPREAAADSAGEGEGEIRAMVTVFVAATDIARRAWSSEGRRRRPDRWAPQRQRERGST

SEQ ID NO: 78924 - protein, 418 aa, Zea mays
  Coding DNA Sequence Number=SeqID_37145
MQESLAGPPSQQNPPEGLPTLTTPLLPLPLSGKCRGFWRKNPETQGTGSLDGGFISNKWRGSLTKAPARRGIGWAEPSDQKRRAQIRSGFPWTGMHPEPLDPRSAVHDLKRHDPNAVRPISSQRLRSKRAKGYPYDLISTVDDQINGDRASSSSHQPSRVLRRRRAVEMNGCDPNRPPPSTIVKLNEATRCARHHGHNGCILTGIKVWMKLGHGAVRIHGGDELRRAIAAHWPSNPTRDRFLHLRRNPPMLSVRTAAAKESTAAASTAAARRVSGGGDFCSGGKGLRKPLTGPKVPATAREQLRRKLSFTALHPQCALSTLSRFGDGGPALDSYTQVGGGSDPAGTASCCTDPEGSGGRFGWRGRGRDSRDGDGVRRGNRHRTARLSHRWLRPTCRRGEQSADSERAARKERRWAATR

SEQ ID NO: 78925 - protein, 319 aa, Zea mays
  Coding DNA Sequence Number=SeqID_37146
MTLTLSVRSHLNGSDPNARRGYPYDLISTVDDQINGDRASSSSHQPSRVLRRRRAVEMNGCDPNRPPPSTIVKLNEATRCARHHGHNGCILTGIKVWMKLGHGAVRIHGGDELRRAIAAHWPSNPTRDRFLHLRRNPPMLSVRTVAAKESTAAASTAAARRVSGGGDFCSGGKGLRKPLTGPKVPATAREQLRRKLSFTALHPQCALSTLSRFGDGGPALDSYTQVGGGSDPAGTASCCTDPEGSGGRFGWRGRGRDSRDGDGVRRGNRHRTARVEFGRKTETTRQMGPATSAREGEYVGAAEPPMAQAHLSAWRAKRR

SEQ ID NO: 78926 - protein, 542 aa, Zea mays
  Coding DNA Sequence Number=SeqID_37147
  Subcellular localization annotation: CTP_CleavageSite=69; ConfidenceScore=5.07e-01
MGKKEELPAQPNREGKGVSDFGRPFSSFSPWNRIKPPRRANPASTLAPRVYKSHSGLDRTPPRVTGPTRAQGRREFCPRERASSKRLILWYLLLTCEVAHLYPQAVLPICQGVMNPIHLYQGSEAGIAIAAKSSRGPPYTDHSPTALAPFGYQDDSSDPRDLTASRSNTNIHGKCRGFWRKNPETQGTGSLDGGFISNKWRGSLTKAPARRGIGWAEPSDQKRRAQIRSGFPWTGMHPEPLDPRSAVHDLKRHDPNAVRPISSQRLRSKRAKGYPYDLISTVDDQINGDRASSSSHQPSRVLRRRRAVEMNGCDPNRPPPSTIVKLNEATRCARHHGHNGCILTGIKVWMKLGHGAVRIHGGDELRRVIAAHWPSNPTRDRFLHLRRNPPMLSVRTAAAKESTAAASTAVARRVSGGGDFCSGGKGLRKPLTGPKVPATAREQLRRKLSFTALHPQCALSTLSRFGDGGPALDSYTQVGGGRTRQVRRVVARTPREAAADSAGEGEGEIRAMVTVFVAATDIARRAWSSEGRRRRPDRWAPQ

SEQ ID NO: 78927 - protein, 61 aa, Zea mays
  Coding DNA Sequence Number=SeqID_37148
  Gene Ontology: Mol. function=methyltransferase activity; Biological process=metabolic process
  Homolog annotation: Hit_ID=Q33AG7; Match level="QueryCoverage=91%, HitCoverage=22%, E-value=8e-11, Identity=52%"; Hit description=CMV 1a interacting protein 1, putative, expressed
MSRLVGALITFKPLYSVLKLASREVIISSSLVLLGDGRDVDYLNPFHAYDKGNLSWLLNFS

SEQ ID NO: 78928 - protein, 273 aa, Zea mays
  Coding DNA Sequence Number=SeqID_37149
  Gene Ontology: Mol. function=methyltransferase activity; Biological process=metabolic process
  Homolog annotation: Hit_ID=Q33AG7; Match level="QueryCoverage=57%, HitCoverage=62%, E-value=2e-31, Identity=84%"; Hit description=CMV 1a interacting protein 1, putative, expressed
  Pfam annotation: Domain name=Methyltransf_11; Domain location=141 -222; Score=36.9; E_value=7.1e-08; Accession=PF08241.2; Description =Methyltransferase domain
  Pfam annotation: Domain name=Methyltransf_12; Domain location=141 -231; Score=23.5; E_value=0.00073; Accession=PF08242.2; Description =Methyltransferase domain
  Pfam annotation: Domain name=Ribosomal_S8e; Domain location=25-273; Score=-26.6; E_value=0.0097; Accession=PF01201.12; Description =Ribosomal protein S8e
  Pfam module annotation: Pfam domain module=Methyltransf _11::Methyltransf_12::Ribosomal_S8e; Domain location=141-222::141 -231::25-273
  Subcellular localization annotation: CTP_CleavageSite=55; ConfidenceScore=5.31e-01
MGGSSTVAANWAHTGHPLSPQLPPNRSRGLGEAHCPRARPQFGFEHDRRRGSNLTAETAMGALERSAWSGEATLSRLVGALIAFKPLYSVLKLASREVIIRTAEKSNIPWREMTKEVLESDVYEVFERIQDPNLVYPDCNLDIGCSVGVSTRYLAKKFPSAQAVGLDLSPYFLAVAAQKEEKLSRPKPIRWVHANGEATGLSSDSFDLVSLAYVEQEGEAIVEETKKSNHVQRKIEKRQQDRALDTHIEEQFGSGRLLAYISARPGQCGRADG

SEQ ID NO: 78929 - protein, 193 aa, Zea mays
  Coding DNA Sequence Number=SeqID_37150
  Homolog annotation: Hit_ID=Q08069; Match level="QueryCoverage=17%, HitCoverage=14%, E-value=3e-08, Identity=85%"; Hit description=40S ribosomal protein S8
MEVTLEAICSFLDARTTELETNAYPALDELTSRFSAIFVVVSVNEVEALYRLFKKIGSTFIGNGLINKVPHVVFEEQFGSGRLLAYISARPGQCGRADGYILEANYSGISFYWPATSLRAILNFEEHEQHNNGTHATLWTLDIHYDYMVGAMNAVIDPDNSEDIRSLVLQYLILHRLNRNNSMVSHLDRFKFS

SEQ ID NO: 78930 - protein, 110 aa, Zea mays
  Coding DNA Sequence Number=SeqID_37151
  Subcellular localization annotation: CTP_CleavageSite=36; ConfidenceScore=5.13e-01
MRTNNPSVPVTASFVYPSVSYSKAGHYRYVLLSRVCLSMFDGFDSYQFGATADTTELGGTQLTACRNESLQQFIEHSDADPASRFFPNCSVYPVPLETSLPSHLSRATGL

SEQ ID NO: 78931 - protein, 148 aa, Zea mays
  Coding DNA Sequence Number=SeqID_37152
  Subcellular localization annotation: CTP_CleavageSite=44; ConfidenceScore=5.01e-01
MWVHFDAVFGGPAAGRRAREPRWSQFRALPSVPVTASFVYPGVSYSKAGHYRYALLSRVCLSMFDGFDSYQFGATADTTELGGTQLTARRNESLQQFIEHSDADPASGFFPNCSVYPVPLETSPPSHLSRATGPSVQGKGDTEVSVPN

SEQ ID NO: 78932 - protein, 141 aa, Zea mays
  Coding DNA Sequence Number=SeqID_37153
  Subcellular localization annotation: CTP_CleavageSite=51; ConfidenceScore=5.11e-01
MSKDIKQFVGFTHSHGGRLTPSVPVTASFVYLGVSYSKAGHYRYALLSRVCLSMFDGFDSYQFGATADTTELGGTQLTARRNESLQQFIEHSDADPASGFFPNCSVYPVPLETSPPSHLSHATGPSVQGKEIRKYQCQIER

SEQ ID NO: 78933 - protein, 103 aa, Zea mays
  Coding DNA Sequence Number=SeqID_37154
MNWMLPRQWRKGYWSRIDGGWGVGKSVEDASSSQMSWPMSRRWRKGCWGSPSALDRDHTSHHGFAGGTVALSARCCPPLPHRDLERGWRREVGSGAGRLVIEQ

SEQ ID NO: 78934 - protein, 319 aa, Zea mays
  Coding DNA Sequence Number=SeqID_37155
  Gene Ontology: Mol. function=monooxygenase activity; Cellular component=nucleus; Biological process=electron transport
  Homolog annotation: Hit_ID=Q10KD1; Match level="QueryCoverage=64%, HitCoverage=42%, E-value=1e-89, Identity=76%"; Hit description=IQ calmodulin-binding motif family protein, expressed
  Pfam annotation: Domain name=Ank; Domain location=264-296; Score =24.7; E_value=0.00033; Accession=PF00023.20; Description=Ankyrin repeat
MVFAAGGTSRFVGGGEPREISRVLPVLRDHDVRADAHLYNALMKANVAADDPGAVLREFRQVSVTGTFLVNKEHVESRRWSFMFGDVEVPAEVLTDGTLRCYAPAHQSGRVPFYVTCSNMVACSEVREFEYRDSEAHYMETSRSQANGVNEMHLHIRLEKLLTLGPDDHQMLAINSLMLDGKWSNQESSVKEVVSTARVQSLKKLVKEKLHQWLICKVNDDGKGPNVLCKEGQGVIHLVAALGYDWAIRPIIIVGVNVNFRDAHGWTALHWAASLGRERTVSVLIANGHKIPMRQWRTATGAQRHRASCEPMVRCVVSI

SEQ ID NO: 78935 - protein, 331 aa, Zea mays
  Coding DNA Sequence Number=SeqID_37156
  Gene Ontology: Mol. function=monooxygenase activity; Cellular component=nucleus; Biological process=electron transport
  Homolog annotation: Hit_ID=Q7XI44; Match level="QueryCoverage=76%, HitCoverage=25%, E-value=2e-84, Identity=62%"; Hit description =Putative anther ethylene-upregulated protein ER1
MKIRRKADEIDRRFVPIAHRDHDVRADAHLYNALMKANVAADDPGAVLREFRQVSVTGTFLVNKEHVESRRWSFMFGDVEVPAEVLTDGTLRCYAPAHQSGRVPFYVTCSNMVACSEVREFEYRDSEAHYMETSRSQANGVNEMHLHIRLEKLLTLGPDDHQMLAINSLMLDGKWSNQESSVKEVVSTARVQSLKKLVKEKLHQWLICKVNDDGKGPNVLCKEGQGVIHLVAALGYDWAIRPIIIVGVNVNFRDAHGWTALHWAASLGRVEGLPQHPFLHRCDIGQLICDDEASSTDFPTPHPPSMRLQYPFLHRHDSIQFIYDDHFSFLR

SEQ ID NO: 78936 - protein, 90 aa, Zea mays
  Coding DNA Sequence Number=SeqID_37157
MGFEILWAQLQKDEEVIIKVAFLDPLLGAIAYGAELTQLGAIGYGAEVVLRWHNPDAWRRRGTELGATDLGAELGCVIKIFVADMSTKPI

SEQ ID NO: 78937 - protein, 72 aa, Zea mays
  Coding DNA Sequence Number=SeqID_37158
FGPLLGAIGYGAELTQLGAIGYGAEVVLRWHNPDAWRRRGTELGATDLGAELGSTSTPRVWVVPEQNRTCPG

SEQ ID NO: 78938 - protein, 88 aa, Zea mays
  Coding DNA Sequence Number=SeqID_37159
MATSDRPAGFVTGKATTTTVLDPLLGAIAYGAELTQLGAIGYGAEVLLRWHNPDAWRRRGTELGATDLGAELGCVIKIFVADMSTKPI

SEQ ID NO: 78939 - protein, 68 aa, Zea mays
  Coding DNA Sequence Number=SeqID_37160
LDPLLGAIAYGAELTQLGAIGYGAEVVLRWHNPDAWRRRGTELGATDLGAELGCVIKIFVADMSTKPI

SEQ ID NO: 78940 - protein, 199 aa, Zea mays
  Coding DNA Sequence Number=SeqID_37161
MATVELMEEEDTSRLSELIALAKAGLHGEEEEDTSMLSELIALAEAGLRAQEEDEFMSQAAEEVEATYYKQKCDETKAEDQLFSRAADEAEANYYKRNAEKCHTGQCIKWNEVVVEDCTTNDSEDELLIDFLDPLLGAIAYGAELTQLGAIGYGAEVVLRWHNPDAWRRRGTELGATDLGAELGCVINIFVADMSTKPI

SEQ ID NO: 78941 - protein, 82 aa, Zea mays
  Coding DNA Sequence Number=SeqID_37162
MGWLKVNGVTRLLGMMRGHGGRSGGCNTARRVLYRREVWSRRALRGLVAGSTDVIVDIPPQLITFNQRSKSNKYHKNKQSNA

SEQ ID NO: 78942 - protein, 191 aa, Zea mays
  Coding DNA Sequence Number=SeqID_37163
MAAVARRSADRWMAGRDGGGVEEDEGAKAFGQTIGDGAGSSAGSGFLVTRRSQQPEPNAIPMSPAVMGPGPAAPRPHRLRAGLNLHDDITSCISMTRWWVPKYNYSLGTLYFDFYYYSPKSDFGRYKSYPLKNNLVLEIYVIVDITPQLITFNQRSKSNKYHKNKHSSIQIPIKIVLFLFLRVGLLFLKSL

SEQ ID NO: 78943 - protein, 112 aa, Zea mays
  Coding DNA Sequence Number=SeqID_37164
MAKNPPGNPVDSGVGIGDNVVEEVPWWPPLAPPCVRELLQPTTSIGSVEEMRGTWFYRHEDVIVDITPQLITLNQRSKSNKYHKNKHSSIQIPIKIVLFLFLRVGLLFLKSL

SEQ ID NO: 78944 - protein, 231 aa, Zea mays
  Coding DNA Sequence Number=SeqID_37165
  Gene Ontology: Mol. function=ubiquitin thiolesterase activity; Cellular component=nucleus; Biological process=ubiquitin-dependent protein catabolic process
  Homolog annotation: Hit_ID=Q1SJA4; Match level="QueryCoverage=42%, HitCoverage=42%, E-value=3e-18, Identity=52%"; Hit description =Putative ubiquitin-specific protease UBP27-related
MQTTSCTVGSNHSCMVPILVPHCRLVYLGGRAYYVGGQRNLGNNCFLNVILQALASCDGFISFLDNLLATDGLLPEEKAVRIPLLLALSSLLEDLSIVRDERTVLNPHGVMHALSLYVGRFNLTRQQLSLDFENFHCLPLSPVLNANGDITSGCSLVDCLKYFTVVEHLDNYRCDRCWHIIAAKYLSLRSEVDELQGYVPPGVTAMFIIFTSNKAADYQSVPEGIQNLSTR

SEQ ID NO: 78945 - protein, 292 aa, Zea mays
  Coding DNA Sequence Number=SeqID_37166
  Gene Ontology: Mol. function=ubiquitin thiolesterase activity; Cellular component=nucleus; Biological process=ubiquitin-dependent protein catabolic process
  Homolog annotation: Hit_ID=Q1SJA4; Match level="QueryCoverage=33%, HitCoverage=42%, E-value=3e-18, Identity=52%"; Hit description =Putative ubiquitin-specific protease UBP27-related
MKLRLTGDVLMEPAICTFMHGSYPLRGKHYHEMINPFRVLTDVSYIHVFQVKKLIKEKKNDAGIFEYIDINKELQEGKTTSHFAAMFSGSGRAYYVGGQRNLGNNCFLNVILQALASCDGFISFLDNLLATDGLLPEEKAVRIPLLLALSSLLEDLSIVRDERTVLNPHGVMHALSLYVGRFNLTRQQLSLDFENFHCLPLSPVLNANGDITSGCSLVDCLKYFTVVEHLDNYRCDRCWHIIAAKYLSLRSEVDELQGYVPPGVTAMFIIFTSNKAADYQSVPEGIQNLSTR

SEQ ID NO: 78946 - protein, 175 aa, Zea mays
  Coding DNA Sequence Number=SeqID_37167
MPGAVVRVSDAVACVSLRGQRWCATRPRFVYPRVAEERREPVKGILCLLGGQEGACGWGVFYVEADGNEARGSWVGLTGDVLMEPAICAFMHGSYPLRGKHYHEMINPFRVLTDVSYIHVLQVKKLIKEKKNDAGISEYIDINKELKEVYGTMIHLRVSDSYVLSQGQDDKSFCC

SEQ ID NO: 78947 - protein, 116 aa, Zea mays
  Coding DNA Sequence Number=SeqID_37168
  Subcellular localization annotation: CTP_CleavageSite=21; ConfidenceScore=5.15e-01
MGTGVAVGVTIGGPTVIASTSAQEQQANRQSDSGPTCRLASSPEAGPGATVGTLNQGYPLLQYKDAIHTASGVILQTACLSSLLSNSAPVPYGALCSPSLMQEASPARRGYADLGC

SEQ ID NO: 78948 - protein, 291 aa, Zea mays
  Coding DNA Sequence Number=SeqID_37169
  Gene Ontology: Mol. function=ribose-5-phosphate isomerase activity; Biological process=pentose-phosphate shunt, non-oxidative branch
  Homolog annotation: Hit_ID=Q8LBQ2; Match level="QueryCoverage=44%, HitCoverage=47%, E-value=5e-16, Identity=40%"; Hit description =Putative ribose 5-phosphate isomerase
  Pfam annotation: Domain name=Rib_5-P_isom_A; Domain location=2-158; Score=-0.1; E_value=1.5e-09; Accession=PF06026.5; Description=Ribose 5-phosphate isomerase A (phosphoriboisomerase A)
MTSSLKTNRKRGGFIASIVKGHGGSLFREKLIEGVGTHFIIIVDASKLVSRLGCMGINPVEVIPFGVLHMLGLIHGHFDGLPRLHARLRSVPTAAAKEEEDSEQSSVTNNGSYIVEMFFEDDIHGDLRDISDRLLQITSIVEQGMFLSYFSHVEEGGYAREKVQLTEDGAPVQSVVKQCARAIRCTVLTIPYARSFPCTPRIRRSRMSGMMVQIIEHHAETSTDFLVEEEVVLHATGLRPPSAGHCCCARCTAAYNSVDIPDSVKNGPRSIVSSKGVAASPSKLHGLTRGH

SEQ ID NO: 78949 - protein, 302 aa, Zea mays
  Coding DNA Sequence Number=SeqID_37170
  Gene Ontology: Mol. function=ribose-5-phosphate isomerase activity; Biological process=pentose-phosphate shunt, non-oxidative branch
  Homolog annotation: Hit_ID=Q8LBQ2; Match level="QueryCoverage=43%, HitCoverage=47%, E-value=5e-16, Identity=40%"; Hit description =Putative ribose 5-phosphate isomerase
  Pfam annotation: Domain name=Rib_5-P_isom_A; Domain location=104-264; Score=0.3; E_value=1.4e-09; Accession=PF06026.5; Description=Ribose 5- phosphate isomerase A (phosphoriboisomerase A)
  Subcellular localization annotation: CTP_CleavageSite=74; ConfidenceScore=5.63e-01
MGFAATNGGELVAGGHDGGAPCSVTVRVSAGRVSSPWVSSRGGWSPTSFSPTSAASWHGSGRTSARRSASAPCSTSYLKHRGGCTLRHAHQVFDVVINCGAYYAHNMTSSLKTNRKRGGFIASIVKGHGGSLFREKLIEGVGTHFIIIVDASKLVSRLGCMGINPVEVIPFGVLHMLGLIHGHFDGLPRLHARLRSVPTAAAKEEEDSEQSSVTNNGSYIVEMFFEDDIHGDLRDISDRLLQITSIVEQGMFLSYFSHVEEGGYAREKVQLTEGVSRHLYVTRTHFLGMHSSELERGLVHCI

SEQ ID NO: 78950 - protein, 73 aa, Zea mays
  Coding DNA Sequence Number=SeqID_37171
  Homolog annotation: Hit_ID=Q6Z0V1; Match level="QueryCoverage=55%, HitCoverage=10%, E-value=5e-13, Identity=95%"; Hit description =Putative synovial sarcoma, X breakpoint 2 interacting protein
ARMTQLQDAQKGAEVTSEATDRELELEAQLVEARSIIQEQSFYRQCMKGGPSAAVEPTVCNRKVPDSSPILCG

SEQ ID NO: 78951 - protein, 265 aa, Zea mays
  Coding DNA Sequence Number=SeqID_37172
  Gene Ontology: Mol. function=DNA binding; Cellular component =nucleosome; Biological process=chromosome organization and biogenesis (sensu Eukaryota)
  Homolog annotation: Hit_ID=Q6WLH1; Match level="QueryCoverage=57%, HitCoverage=51%, E-value=2e-81, Identity=99%"; Hit description =Single myb histone 6
  Pfam annotation: Domain name=Myb_DNA-binding; Domain location=5-57; Score=26.3; E_value=0.00011; Accession=PF00249.21; Description=Myb -like DNA-binding domain
MGAPKQRWTSEEEAALRAGIARHGVGKWRTILKDPEFSSTLCYRSNVDLKDKWRNMNVIVSTSSSRDKAKSALKRIRTIPKNNEHTMAITRVTSDIDDEIVDEKPIVSLPSEAKNTSSSKKSHRLDNIIMEAIKNLNEPTGSHRTTIANYIEKGGPGAAVEPTVCNRKVLGSSPSLCILCGRPRTVREAYGTGYAHARSGTNFLFTLFQLYERKTAALSTGLVLVSFEMIMLAYSTMLVEIMIALICYMWNQFLTLVCLGAILAT

SEQ ID NO: 78952 - protein, 251 aa, Zea mays
  Coding DNA Sequence Number=SeqID_37173
MVLKGGPGAAVEPTVCNQKVPGSSPSLCILCGDQKEARGPTLYPVSRVLLCRASGKGDGFSTASRASTADGREGSGSGDPCRPSARASSVPLPPVRRAPTARAASTAQQASRSASAPLSAVRSSRGREPLRGYDPPPDGPSSGAGEQLRASGLRPPSARARTEALRPPSVERLTARAGEQLRASARRPLGPSSSLAQPQSRCAFRFQVPAIPNFFFVLRHWLCKRLYYIIDYTVYIVKFKLRDEDKLLETA

SEQ ID NO: 78953 - protein, 176 aa, Zea mays
  Coding DNA Sequence Number=SeqID_37174
  Subcellular localization annotation: CTP_CleavageSite=48; ConfidenceScore=5.79e-01
MAGAAATAHCSLSRPPSPISCTHRIFSIPSPSSSSASHQGAPATREVRARPLRALPARCPPARQSCSALLHLPAPPKSSQELPSASLFAPALGAHPCGAQRFSLSGSRSPSSSMAFGPKFLIPFTPAVLVQPWSHGGGTPRSVHGLSLRRWCSTTSAASPLVSFRCECPHPSGQQQ

SEQ ID NO: 78954 - protein, 230 aa, Zea mays
  Coding DNA Sequence Number=SeqID_37175
  Gene Ontology: Mol. function=translation initiation factor activity; Cellular component=signalosome complex
  Homolog annotation: Hit_ID=Q8GVI0; Match level="QueryCoverage=47%, HitCoverage=41%, E-value=1e-23, Identity=80%"; Hit description =Putative eIF3e
  Subcellular localization annotation: CTP_CleavageSite=28; ConfidenceScore=5.51e-01
MAFGPKFLIPFTPAVLVQPWSHGGGTPRSVHGRSLRRWCSTTSAASPLVSFRSADVLQWSLPLPLCVGHLNCNAQSRAQIVSSHSQIQPLRIWPALTSLNDWHTAQGTTRRARTPRMRGKNRFRSVLTRLKLCISMPNFSLSVVTTQGLLITFTSMVLCAQTVSEMYLNAIPTNAHHLIRYLATAVVVNKRRRNMLKELIKVIQQEHHTYKDPITEFLECLYVNYVVVGF

SEQ ID NO: 78955 - protein, 240 aa, Zea mays
  Coding DNA Sequence Number=SeqID_37176
  Homolog annotation: Hit_ID=Q9M2L8; Match level="QueryCoverage=16%, HitCoverage=9%, E-value=2e-11, Identity=80%"; Hit description =Translation initiation factor 3-like protein
  Subcellular localization annotation: CTP_CleavageSite=37; ConfidenceScore=5.23e-01
MEPPRRPCHIPDSPTPHPTARRRRHPDPRSRLTPPVSQASFVAATCTQALKEVERREHEIHGSRRGAGNVEVIFPESHVVSGAPASSVADSTEPASTSLAAADSSALAKKDIAALSPELRAQATDLKSRQGHRTLDGKFGRFFLQFESGNYSGAVDYLYQYRALCTNSERNVSALWGKLATEILECEQLWASLRIIPSWLVSKGARIEPGTVVFFRGMAKVVVNEFTGGGCQCWSLVLNC

SEQ ID NO: 78956 - protein, 78 aa, Zea mays
  Coding DNA Sequence Number=SeqID_37177
  Subcellular localization annotation: CTP_CleavageSite=34; ConfidenceScore=5.32e-01
MGGPAVIASTGVQEQRANRQSNFGPTCRLASSPKASPRATVGTLNQGYPLLRWTGPPQGAPDHCTHNPDPRLRPGTPK

SEQ ID NO: 78957 - protein, 227 aa, Zea mays
  Coding DNA Sequence Number=SeqID_37178
METQHGSLPTPRYWGARGMEPWLSPLPTSTRLISPLAPRSVTGKVSPDAHQGSHPMTWGQTSHVIQAGPKREEGESSHKERATAVRLYAPPSSPQPAVKEANRRTRNVQPPHDCAPPRFLCNRWSNLWHGGPGPHVMHPTRRFLGAEKSHRCSRQYRASSSPSQKTEKINLQNQCSDSRHPAHGPSKTLSAEVTGQSAAGTCVTVDVTMGGPAVIASTGAEEQRSNR

SEQ ID NO: 78958 - protein, 252 aa, Zea mays
  Coding DNA Sequence Number=SeqID_37179
METQHGSLPTPRYWGGAWDGAVAQPAAHLHEAGNHPSPRMLEEEAGKNVASTDIPAEISPLAPRSVTGKVSPDAHQGSHPMTWGQTSHVIQAGPKREEGESSHKERATAVRLYAPPSSPQPAVKEANRRTRNVQPPHDCAPPRFLCNRWSNLWHGGPGPHVMHPTRRFLGAEKSHRCSRQYRASSSPSQKTEKINLQNQCSDSRHPAHGPSKTLSAEVTGQSAAGTCVTVDVTMGGPAVIASTGAEEQRSNR

SEQ ID NO: 78959 - protein, 150 aa, Zea mays
  Coding DNA Sequence Number=SeqID_37180
  Subcellular localization annotation: CTP_CleavageSite=28; ConfidenceScore=5.05e-01
MERLAAMGVQGACSCRGACSCRKAGRRRAERRGAGRPWPERRASRLRGSPRLPRRGSSHGGQLGDGALVSAGRRARAWGSRSTLRANERAERGPERHAMRRPNDGRSRAHHGEEEEVDTTEIPLENADSDYVFGRRPTIEKADSDTDWIT

SEQ ID NO: 78960 - protein, 52 aa, Zea mays
  Coding DNA Sequence Number=SeqID_37181
MEKRKACWRAGARGAQREVDTTEIPLENADSDYVFGRRPTIEKADSDTDWIT

SEQ ID NO: 78961 - protein, 46 aa, Zea mays
  Coding DNA Sequence Number=SeqID_37182
MEDELDVGKKAESASTEIPLENADSDYVFGHRPNIEKADSDTDWIT

SEQ ID NO: 78962 - protein, 46 aa, Zea mays
  Coding DNA Sequence Number=SeqID_37183
MEDELDVGKKAEIGSTEIPLENVDLDYVFGHRPNIEKADSDTDWIT

SEQ ID NO: 78963 - protein, 64 aa, Zea mays
  Coding DNA Sequence Number=SeqID_37184
MGEELGSTRKGAERGVGLPFSRKKGAAGTSLAEVDTTEIPLENADSDYVFGRRPTIEKADSDTD

SEQ ID NO: 78964 - protein, 94 aa, Zea mays
  Coding DNA Sequence Number=SeqID_37185
MARDPLRGLYKVPLASENPLQFMGRALARIPRLTTIAAKSTQERPWMQLPYCPCPFRVPSDLDPSDLSQNHSVKKHKGNEGWNRAEAMRKGASA

SEQ ID NO: 78965 - protein, 125 aa, Zea mays
  Coding DNA Sequence Number=SeqID_37186
MPPRLHLLLRKGGRVLLLPLLVSALLLLTQAAMQSLQLLNMLYPVPTSHVTHLPRDRDFHTPLPRKRGRATLRGLYKVPLASENPLQFMGRALARIPRLTAIAAKSTRERPCMQLPYCPCPSRVR

SEQ ID NO: 78966 - protein, 199 aa, Zea mays
  Coding DNA Sequence Number=SeqID_37187
MARDPLRGLYKVPLASENPLQFMGRALARIPRLTAIAANQPENLLACNSPTALAPFGNSKNYPSDSGVNKMTRVLALVVAIQTNMRTSQTLRTDLHGKGVREWGLTTSWRVRGGSRMSSEQLLVRCQPIEPDDFTKAPTSHGKALGRCAEDDSPPWVEIFGGGPGEIFRRGRAMVAASSRTAHGRGGCGGGVWEWHSEQ

SEQ ID NO: 78967 - protein, 128 aa, Zea mays
  Coding DNA Sequence Number=SeqID_37188
MVSVARGLWAAIGEIDLGEVIGNGSIPCPLLGSTGLGLLRPVYVLTGARLRSAPSGTSSREGIELQGPLCKSSVTHKNKNEEEVEVTEEKTPPPSESQAGNCFYFDICGSEPDSLINEGKPRCIRHPP

SEQ ID NO: 78968 - protein, 125 aa, Zea mays
  Coding DNA Sequence Number=SeqID_37189
MALDTKPLRHVPRPSSSLILEPKTPTLSSLNFTNDSGNPKFSEFREGKLYSRLTWHSDEHYMAFILIYTHIWFCLENEEEVEVTEEKTPPPSESQARNCFYFDICGSEPDSPINEGKPRCMCHPP

SEQ ID NO: 78969 - protein, 128 aa, Zea mays
  Coding DNA Sequence Number=SeqID_37190
MDRLIRSPNDEIDLGEVFENKEEVEVTEENTPQPSESQAGNCFYFDICGSEPDSPINEGKPRIHFSKHFCKTESLIFEKPYLDSLNQHPLESLFFSRVRKRQTFVASVLRWYQRMNARNEVREERILH

SEQ ID NO: 78970 - protein, 154 aa, Zea mays
  Coding DNA Sequence Number=SeqID_37191
  Homolog annotation: Hit_ID=Q10BX5; Match level="QueryCoverage=41%, HitCoverage=16%, E-value=6e-11, Identity=53%"; Hit description =Expressed protein
MPHRTATQDWVLWDVEVVQLLTPAPRPERTGSAPVAKLSDSRPAPDLGKPLQAHGPHHHPSKSYATPPPTLEPEAPPPSSRFNKLERSADWAPQTVCGCGWDYHFGRKLVEARDELMKGRYHKYKSPRRGSIDPSDESFFIKHCLYSSSLPLAH

SEQ ID NO: 78971 - protein, 66 aa, Zea mays
  Coding DNA Sequence Number=SeqID_37192
MEGQGQHRIYCIFDDAVADIGDGFVWDADSRLYYHASVPQIGHRRRSVVVDGIIVLAESWLKLVMN

SEQ ID NO: 78972 - protein, 506 aa, Zea mays
  Coding DNA Sequence Number=SeqID_37193
  Homolog annotation: Hit_ID=Q75LJ3; Match level="QueryCoverage=24%, HitCoverage=34%, E-value=2e-41, Identity=74%"; Hit description =Putative flavoprotein alpha-subunit, having alternative splicing products
  Pfam annotation: Domain name=ETF_alpha; Domain location=329-384; Score=49.8; E_value=9.4e-12; Accession=PF00766.10; Description =Electron transfer flavoprotein alpha subunit
MATGARLRAGLPRDDAPPQQEMVAANGTGQPQLVVDEHKTILEEVPREENGTLSAANYAAQGHENVAAEYYKQQEEQEKVVASESLAIWLSNIANMVLFAAKVYASTCCHDISCGLLPFQCKRQIPIETQLEKRMQPLNQGMQVGIAWLVIRGLICSGFHVGIKELAEVSFPQDDKQTEKTTLKRSADWAPQTVCGCGWDYRFGRKLVEARDELMKGSLPVLTQRGEPRIYSRTLFPYELFVKLYSKVELHPFGLHNLGNRPIYAGNALCTVKYTDEDPCMMSIRSTSFSPTADAMSETKVAPITQVDLSFLSEGKSTWVNLTSQDTKRHDLANACVVVTGGRGLRSAENFKLLEQLAEKFGAAAGATRAAVEAGYVPNDLQSCRRRLQQLESQLMEANRIKEEGNTGRDNEKGGTEEDDEPVVVVAKIWENNKFVDYDSSKEKENDGDSQVDLESNKGDAGLDSNGLHSTKENSGRASPTKQHQQYKKKSLLKRFGGLLKKKSEN

SEQ ID NO: 78973 - protein, 75 aa, Zea mays
  Coding DNA Sequence Number=SeqID_37194
MASSSAASGTPGMECKCNLFIKDKNLLHVQAKAIERCRQGTEERIGHKNPKVQLLALTGPSSMGYWTDKTLNHLE

SEQ ID NO: 78974 - protein, 716 aa, Zea mays
  Coding DNA Sequence Number=SeqID_37195
  Homolog annotation: Hit_ID=Q75HI8; Match level="QueryCoverage=18%, HitCoverage=32%, E-value=1e-58, Identity=84%"; Hit description =Putative phosphatase
  Pfam annotation: Domain name=KH_1; Domain location=118-162; Score =5.4; E_value=0.23; Accession=PF00013.19; Description=KH domain
  Pfam annotation: Domain name=KH_1; Domain location=42-116; Score =40.3; E_value=6.7e-09; Accession=PF00013.19; Description=KH domain
  Pfam annotation: Domain name=KNOX1; Domain location=262-306; Score =58.0; E_value=3.1e-14; Accession=PF03790.4; Description=KNOX1 domain
  Pfam module annotation: Pfam domain module=KH_1::KH_1::KNOX1; Domain location=118-162::42-116::262-306
MRQQTGKRPSQHREYEREERKDQHKRSFPRVQESSNNDGLVLYRILCPNSLIGSVIGKHGNVINAIRHQTSAKVKVVDPYPGADKRVTLVYCYVKHRDIDAEGDDNEPVCAAQDALLTASNVIGKSGVVIKHLRSTSRAFIKVSPKDPSDPTHSCAMSFDLFRRAQPVVLPSHSRHLAPRTRFRQSRSAHTPSAPDPDPATIIGATSPPAPNPDPVAPPSSSPVSPASAANPAGCSRTRENARAAVASLPNPSSFSPGVGGEREKATIAAHPLYEPLLEAHVPCLRVATPVDQLPRIDAQIAARPPPLATAAGAATAGGPSGGEELDLFMVRLDPPTGSFLSHLLCSCALQLNCYRFADLGCGEFGIWDSRKGNRVMLFRTALAPMELYEDQSNDLTDGDKNQEANCSNVDDMYHGLTINSDSEIDSLPDPKDQAAALAALAGWVWAASFYDLTHRARALVQPWVTRQVHAETPAILRFQKLEHKMLDNFFSVLSCVVSVPFYTGFLPLLFWSGHDRLAGQMTLLMAFYDYLGNSVKDMVSAPRPCSLPIRRVTATEDEKENAMEYGLPSSHALNTVCLTGQSKDVVKALKKRIGHKNPKVQLLALTEDGWTTRPHPCKRVAPYREALLLAEKHQNLETDSDRSAAVVADAPPQQEMVAANRTGQPQLVVDEHKTILEEVPREENGTLSAANYAGNGSINDDDATLSAQQERDVQL

SEQ ID NO: 78975 - protein, 230 aa, Zea mays
  Coding DNA Sequence Number=SeqID_37196
MSSPELRESSAWMLEVTRGRWPKNVPIPRAAGEDFFTSHMARDLKVFPYGRNIAVVVVVMNKDHQDAAQKRRAVVRLADPMREAKRAWGSAKTVVASGSSKPVPATKPAVPGPSKASASAKTAASGGTKPPLGGPAKGRELPSPGRRVADFGTNISVEDYFVGSGEGQLVVVPPSAATTSPTAVVGAKGAAQDPWATFCASGEILSAVAAKDVAGSMSQRLREASQQLLQ

SEQ ID NO: 78976 - protein, 148 aa, Zea mays
  Coding DNA Sequence Number=SeqID_37197
MNALSREGCRHYDVFDQSDENFEREIFKAEDPVVKQSAGALFDRMCSLLGREAVRERSDRAIEQLKMARAEDVEDLGGLAGAPPEATEVNPVPPPDAGEGSSAAPVPTVAGEDPLSAPVPTGKDALRVVSKPAAEDPTTAAGPSQVAE

SEQ ID NO: 78977 - protein, 711 aa, Zea mays
  Coding DNA Sequence Number=SeqID_37198
MSSPELRESSAWMLEVTRGRWPKNVPIPRAAGEDFFTSHMARDLKVFPYGRNIAVVVVVMNKDHQDAAQKRRAVVRLADPMREAKRAWGSAKTVVASGSSKPVPATKPAVPGPSKASASAKTAASGGTKPPLGGPAKGRELPSPGRRVADFGTNISVEDYFVGSGEGQLVVVPPSAATTSPTAVVGAKGAAQDPWATFCASGEILSAVAAKDVVDFTDRVASGVLTADVAAELESLQAQHADAVREKSAAESKNRRLAEKVAAMEAEKTDLRRQLAEERREANQAIAEAQAARAEAKVARAESSLASQRAEELEARFNALRSRVDKAEASTHSKVERTHAQFVDAYRELGARTADFEVPGREAGLRFLEWLQEELLVLPAIVEGFMSFASLVTCEGTMNALSREGCRHYDVFDQSDENFEREIFKAEDPVVKQSAGALFDRMCSLLGREAVRERSDRAIEQLKMARAENVEDLGGLAGAPPEATEVNPVPPPDAGEGSSAAPVPTVAGEDPLSAPVPTGKDALRVVSKPAAEDPTTAAGPSQVQGFGPAHATATDNANFVAASTVVAKDDSDDSVSNCFESDDSGSSIVWTEESSDEDLDYFVALDVAVVETSPRVMGAEDLPGASAGRRRRRAVAKRRVSELSRSDRRHRGEMEGGRLRVDGTGKRELLSSPAGASVGEGELRNLFEGEELRIMLFNYREMGIIPKVEPI

SEQ ID NO: 78978 - protein, 122 aa, Zea mays
  Coding DNA Sequence Number=SeqID_37199
MRLLGKLVENECGKIDRLMEFYTRKIVLKFRCLVTKEYHTGSSKDKSINLDRWTISVSIEKLRKGWRTAQSCAGAAGRAGPWLVEAFTSKTVEFLLDLCSGVGSRRESEFGPWISIRRWGAH

SEQ ID NO: 78979 - protein, 54 aa, Zea mays
  Coding DNA Sequence Number=SeqID_37200
MRLLGKSVENECGKIDRLMEFYTRKIVLKFRCLVTKEVDEEASICTLLGWCSCG

SEQ ID NO: 78980 - protein, 85 aa, Zea mays
  Coding DNA Sequence Number=SeqID_37201
  Homolog annotation: Hit_ID=Q68V15; Match level="QueryCoverage=38%, HitCoverage=16%, E-value=4e-07, Identity=78%"; Hit description =Armadillo-like
MGPSDSVGVYVDYGSEQILRLKAELAKSSSDPKTFHLEALRSTAYSGCINKGSRRMRLLGKLVENECGKLDRLMEFYTRKIVLKF

SEQ ID NO: 78981 - protein, 174 aa, Zea mays
  Coding DNA Sequence Number=SeqID_37202
MTTLPFAHPPHSSSEAERNRGTLQISASTRVIRVRFQDPLQPSLGSGHMDSADSIADKAIGRMQEISDKIFSVARETIRPGHGLTSFDATKLRVALEEIACMLEQDSLVLQEHLDIVNNFNIPVDSSYEPSTLSSPPPSDDDLTPHWDFAEHFQNFWGVEYDSDQMPSFSDNDV

SEQ ID NO: 78982 - protein, 219 aa, Zea mays
  Coding DNA Sequence Number=SeqID_37203
MNHGLGLIYTGVDCHPVPGMRNNPSGSGGFARWFRHQLRPEVDGGPTRRTHVAVSKRDRARPGDTGTWAQLVGADFPINSGYSSEDPRSTSGKMDSTDSIADKAIGRMQEISDKIFSVARETIRPGRGLTSFDATKLRVALEEIACMLEQDSLVLQEHLDIVNNVNIPVDSSYEPSTLSSPPPSDDDLTPHWDFAEHFQNFWGVEYDSDQMPSFSDNDV

SEQ ID NO: 78983 - protein, 207 aa, Zea mays
  Coding DNA Sequence Number=SeqID_37204
  Subcellular localization annotation: CTP_CleavageSite=60; ConfidenceScore=5.49e-01
MANLTCRSSAVSGCDRGSATSSINPTGILKPRLVPPSHLSSSQISPSTRVIRLRIEDQLQASSQGTGHVTTPNFCRYYPCLMDSADSIADKAIGRMQEISDKIFSVARETIRPGRGLTSIDATKLRVALEEIACMLEQDSLVLQEHLDIVNNVNIPVDSSYEPSTLSSPPPSDDDLTPHWDFVEHFQNFWGVEYDSDQMPSFSDNDV

SEQ ID NO: 78984 - protein, 578 aa, Zea mays
  Coding DNA Sequence Number=SeqID_37205
  Gene Ontology: Mol. function=aminoacyl-tRNA ligase activity; Biological process=alanyl-tRNA aminoacylation
  Homolog annotation: Hit_ID=Q10A14; Match level="QueryCoverage=49%, HitCoverage=33%, E-value=4e-52, Identity=37%"; Hit description =Alanyl-tRNA synthetase, mitochondrial, putative, expressed
  Pfam annotation: Domain name=DUF544; Domain location=508-577; Score= -30.3; E_value=0.027; Accession=PF04424.4; Description=Protein of unknown function (DUF544)
  Pfam annotation: Domain name=tRNA-synt_2c; Domain location=14-449; Score=-223.0; E_value=6.3e-10; Accession=PF01411.9; Description=tRNA synthetases class II (A)
  Pfam module annotation: Pfam domain module=DUF544::tRNA-synt_2c; Domain location=508-577::14-449
MATLSWLMEWSVENVCEAFFSYFGENQHVRLPSTPVIPVDDPKVPLLHTCLHRFKGTLGGRERHRTCFSPRCIIASGDEDLIDRFRIDATFHRLTEILGSWSHGYYFKEEAIGLLFSLLTEVDFWMADETGPCGPCIGFFHDCSDNNDGVDSVRNITNAKLVEICRLVFVEFDRQADGVLEPFQAKHVLTRINLECLAAILQKKESHYDLDVYAYVIRQVYSRTGKGFKDYTGKVGAVDTNGVDTTYRLVADHMRMIAVTNAPGSQLGLGNEGREYFLKCADKQAVKYGYQVLKINEEDYDIEIIDRIVKDEVMIYKKTKAELWNHEQPFDTRKKKKRNKNVPAVVWYPTRIIEFLGPRTPIILKEKDTRCSLVAILAWLVTRNLRCLLTFTCACTTKQVNRSALNIIYSVLALSKKGFTLTSWSLLEMPRTEFIHFLFLCHCRQRSPAWREKNPRFRYQESVGEPSHPSCPEAPFVWQYTNAGMQLYICKCFENECPLTLKLSYCPLILQLEQNLELSEFNKQVLGVLPKLTCSLYFDVTFSSSCGLEKTFETALFGFLGVPLRHGWLVDPQILFLT

SEQ ID NO: 78985 - protein, 146 aa, Zea mays
  Coding DNA Sequence Number=SeqID_37206
  Pfam annotation: Domain name=DUF544; Domain location=1-116; Score= -24.3; E_value=0.0075; Accession=PF04424.4; Description=Protein of unknown function (DUF544)
GDISFEPHETVVSMEYLLGLVLALLGGSVKMQDYSDERKSQILNVVKSLAGGFDMDVIFTRTDGFTMTPEWLLLDCLDLNLRHGWIAARILPSSVQSARLFFDFPRPEPDEGGCRSVGRNSDAEEAFQTSRKCGKEGKTMRLPPRL

SEQ ID NO: 78986 - protein, 210 aa, Zea mays
  Coding DNA Sequence Number=SeqID_37207
  Pfam annotation: Domain name=DUF544; Domain location=94-207; Score= -6.2; E_value=0.00016; Accession=PF04424.4; Description=Protein of unknown function (DUF544)
MDLKKKEKDSNKDKDDEDTKDKDDGKEEDSNEDRDDEETEEKDDGNVAPQTYFLQGRHINLNVRPINFLGLSTHVIHQINDGPCALIAAMFYSQGDISFEPHETVVSMEYLLGLVLALLGGSVKMQDYSDERKSQILNVVKSLAGGFDMDVIFTRTDGFTMTPEWLLLDCLDLNLRHGWIAARINGVLNSLVTDSNYLETRVVWQTLDGM

SEQ ID NO: 78987 - protein, 813 aa, Zea mays
  Coding DNA Sequence Number=SeqID_37208
  Homolog annotation: Hit_ID=Q10A14; Match level="QueryCoverage=35%, HitCoverage=33%, E-value=6e-52, Identity=37%"; Hit description =Alanyl-tRNA synthetase, mitochondrial, putative, expressed
  Pfam annotation: Domain name=DUF544; Domain location=508-592; Score= -6.3; E_value=0.00016; Accession=PF04424.4; Description=Protein of unknown function (DUF544)
  Pfam annotation: Domain name=tRNA-synt_2c; Domain location=14-449; Score=-223.0; E_value=6.3e-10; Accession=PF01411.9; Description=tRNA synthetases class II (A)
  Pfam module annotation: Pfam domain module=DUF544::tRNA-synt_2c; Domain location=508-592::14-449
MATLSWLMEWSVENVCEAFFSYFGENQHVRLPSTPVIPVDDPKVPLLHTCLHRFKGTLGGRERHRTCFSPRCIIASGDEDLIDRFRIDATFHRLTEILGSWSHGYYFKEEAIGLLFSLLTEVDFWMADETGPCGPCIGFFHDCSDNNDGVDSVRNITNAKLVEICRLVFVEFDRQADGVLEPFQAKHVLTRINLECLAAILQKKESHYDLDVYAYVIRQVYSRTGKGFKDYTGKVGAVDTNGVDTTYRLVADHMRMIAVTNAPGSQLGLGNEGREYFLKCADKQAVKYGYQVLKINEEDYDIEIIDRIVKDEVMIYKKTKAELWNHEQPFDTRKKKKRNKNVPAVVWYPTRIIEFLGPRTPIILKEKDTRCSLVAILAWLVTRNLRCLLTFTCACTTKQVNRSALNIIYSVLALSKKGFTLTSWSLLEMPRTEFIHFLFLCHCRQRSPAWREKNPRFRYQESVGEPSHPSCPEAPFVWQYTNAGMQLYICKCFENECPLTLKLSYCPLILQLEQNLELSEFNKQVLGVLPKLTCSLYFDVTFSSSCGLEKTFETALFGFLGVPLRHGWLVDPQGPQLTRYGFSSLHNDLIALQPTVLIWNENLITISKANSKQGETNTLVLHIRRCQANGDGVFVDCNFVPTDSKIQSVLGDISFEPHETVVSMEYLLGLVLALLGGSVKMQDYSDERKSQILDVVKSLAGGFDMDVIFTRTDGFTMTQEWLLLDCLDLNLRHGWIAARINGVLNSLVTDSNYLETRIVWQTLDGVPKSSRVGVKAPLCRCFGSDRTPGVAPGGVFRSRTVSMTVAKWFVPDA

SEQ ID NO: 78988 - protein, 189 aa, Zea mays
  Coding DNA Sequence Number=SeqID_37209
  Pfam annotation: Domain name=DUF544; Domain location=24-139; Score= -5.0; E_value=0.00012; Accession=PF04424.4; Description=Protein of unknown function (DUF544)
MEFLLIVTLCLQILRFNQYWQCSIAQGDISFEPHETVVSMEYLLGLVLALLGGSVKMQDYSDERKSQILDVVKSLAGGFDMDVIFTRTDGFTMTQEWLLLDCLDLNLRHGWIAARINGVLNSLVTDSNYLETRIVWQTLDGVPKSSRVGVKAPLCRCFGSDRTPGVAPGGVFRSRTVSMTVAKWFVPDA

SEQ ID NO: 78989 - protein, 170 aa, Zea mays
  Coding DNA Sequence Number=SeqID_37210
MAQLFYRVAVTFSEVSVAHRSYCHAVGHELTRPVFLLPLRPPRGSAKLSTTACGRYKLTVPPAPPCIQAAIAPAPTLNPPPARANFPFSPNPVFRHRENNRTAASTIPKTNEREEEIEVTEEETPPPSESQAGNHFYFDICGSEPDSPMNEGKPRCMQPLSLCFKYFLHT

SEQ ID NO: 78990 - protein, 88 aa, Zea mays
  Coding DNA Sequence Number=SeqID_37211
MGGGHEFRRDTRRSEGKKKHWPREFVANGVAVTPVSHGDFRGGHGDTVKELSHAAYGREAAVTGEQNCRAIDQLQVCHSSHGQILAGS

SEQ ID NO: 78991 - protein, 128 aa, Zea mays
  Coding DNA Sequence Number=SeqID_37212
DQIDRRRKDLTGWRLLCRDWCRGRVGVAHLEKIFTARALAISPVTPWPSLPLCGRVDYLAGDRRLPAMRRVAQLFHRVAVTSSEVSVAHRSYCHAVGHGPDGFNIGKDVPLPGLLTEDPLTGHMPRHG

SEQ ID NO: 78992 - protein, 474 aa, Zea mays
  Coding DNA Sequence Number=SeqID_37213
  Gene Ontology: Mol. function=DNA binding; Cellular component =intracellular; Biological process=regulation of transcription
  Homolog annotation: Hit_ID=Q6ZFT8; Match level="QueryCoverage=98%, HitCoverage=98%, E-value=1e-140, Identity=57%"; Hit description=DNA -binding protein-like
  Pfam annotation: Domain name=HSP20; Domain location=387-474; Score= -20.6; E_value=0.048; Accession=PF00011.11; Description=Hsp20alpha crystallin family
MSDPRGHAAGPDRDGDDPLAEDANSEEAWQTPEKEPVAVSKEAAARGGDTTPDAEPESDDGEGGVGSPDQMEPNADGERAPPVAAAEDPEGIVGSAKVETNGEDAISLDADGEEEDDDDDGDEEEEEEDDDDDDSTPDASPRAEVKVEGESSTGMTQSGAGHRVEVEPDPFLDGDDSGTEEEQGAFMAELERFHREHSLEFKPPKFYGKGLNCLKLWRQVAHLGGHEQVSLLFMIALLSTLYVGISSVEYFCLFRTCTTVSWSFRIFYEKALLEYEKHKVRTGQLQIPPPGLPQPSGADREVVVNQSSSARVRRDAAARAMQGWHAHRLLTNGTYGDNILKDKDTMPLPNRDKNLSFGVLKRKKASSPEEDSMVVDVGEPADWVKINVRQTKDCFEVYALVPGLLREEVHVQSDPAGRLVITGDPEQPDNPWGITPFKKVVVNLPSRIDPHQTSAVVTLHGQLFVRAPFGHPDM

SEQ ID NO: 78993 - protein, 113 aa, Zea mays
  Coding DNA Sequence Number=SeqID_37214
  Homolog annotation: Hit_ID=Q6ZFT8; Match level="QueryCoverage=49%, HitCoverage=11%, E-value=1e-19, Identity=87%"; Hit description=DNA -binding protein-like
MTVAPESHRTVRCTPDSPVHVQSDPAGLLVIIGDPEQPDNPKGITPFKKVVVNLPSGINPHQTSAVVTLHGQLFFSFVDCGASSPVIFLDITRVYVSSIEEIGFHLSRYMMSS

SEQ ID NO: 78994 - protein, 95 aa, Zea mays
  Coding DNA Sequence Number=SeqID_37215
  Gene Ontology: Mol. function=DNA binding; Cellular component =intracellular
  Homolog annotation: Hit_ID=Q6ZFT8; Match level="QueryCoverage=58%, HitCoverage=11%, E-value=1e-19, Identity=87%"; Hit description=DNA -binding protein-like
VHVQSDPAGLLVIIGDPEQPDNPKGITPFKKVVVNLPSGINPHQTSAVVTLHGQLFFSFVDCGASSPVIFLDITRVYVSSIEEIGFHLSRYMMSS

SEQ ID NO: 78995 - protein, 68 aa, Zea mays
  Coding DNA Sequence Number=SeqID_37216
MELGERESASSAREGKQGHGPREQRKTGFDGAVGKSRSAERSTPWEPRGELGASCSREPRYVPNITKI

SEQ ID NO: 78996 - protein, 79 aa, Zea mays
  Coding DNA Sequence Number=SeqID_37217
  Subcellular localization annotation: CTP_CleavageSite=62; ConfidenceScore=5.57e-01
MARACPLVGCCSLARRGSLLQLAPSSPRGSHGVLLSAKRLFPTAPSNPVFLCSRGPRPCFPSLAELAALPMSLSFVFVL

SEQ ID NO: 78997 - protein, 282 aa, Zea mays
  Coding DNA Sequence Number=SeqID_37218
MGAARRARGELQQGATASAGSSSRPGGTRAPWETEERAWEEPLGWARSELRQEGSAVEVGESSDRRGGARNPGHGGGRWALGQKMSADCIFEEPRGGAVEKYQGKKDSDDAARWRENQEEDNDDLKKKSVPTSSSDEYWSGIRRSVSARVRIASRRHSAVIKGDGAEADSRELRDGQRGSTASGFCDKAKPSTQGDQLRIRSRPSEKTWLRAEELGCFFPRLPRQTGRAPERSNWRREGAQYGHGEELNWFGGTGREHARTGDGHTVRSRNRAGSKPVRVGS

SEQ ID NO: 78998 - protein, 46 aa, Zea mays
  Coding DNA Sequence Number=SeqID_37219
MALMGSTSEKMYLYQVRKQPTFVASVLRWYQRKSTRSEAAGGEDPP

SEQ ID NO: 78999 - protein, 60 aa, Zea mays
  Coding DNA Sequence Number=SeqID_37220
MAMMGSTSEKMYLCQVRKQPTFVASALRWYQRKSTRSEVAGGKDPPNFLFELIGRGFCLP

SEQ ID NO: 79000 - protein, 60 aa, Zea mays
  Coding DNA Sequence Number=SeqID_37221
MAMMGSTSEKMYLCQVRKQPTFVASALRWYQRKSTRSEAAGGKYPPNFLFELIGRGFCLP

SEQ ID NO: 79001 - protein, 265 aa, Zea mays
  Coding DNA Sequence Number=SeqID_37222
  Pfam annotation: Domain name=IQ; Domain location=39-59; Score=25.0; E_ value=0.00027; Accession=PF00612.17; Description=IQ calmodulin -binding motif
  Pfam annotation: Domain name=IQ; Domain location=81-101; Score=27.0; E_value=6.6e-05; Accession=PF00612.17; Description=IQ calmodulin -binding motif
  Pfam module annotation: Pfam domain module=IQ::IQ; Domain location=39- 59::81-101
MTVHDAFTRLEESFGRLEENWDQFVVMFHRYKEKTEKELQAAVRLQAAARGFLARRQVQSLRGEKHLAVASRATPWPSSHEQAVVRLQAAVRGFLVRRAVRKLHLLISSSLHQLAACAPNHQVSSILFEPPAEVEIWVCSPPARPERVVFFIRATALVLDRPNIRTGWFLLHLSSNVKSAVQLFPWDPGGQEDIAGVQIYILVPQLFCIFVLNNKGKPRCKRLNLKSCQVSLWQLEDELVLKGGGDVMGIIGSERQQPGWDKARE

SEQ ID NO: 79002 - protein, 178 aa, Zea mays
  Coding DNA Sequence Number=SeqID_37223
METTLFGRAGGLHTQISTSAVGSKSIDETWWLGAQAASWCSDELINKCSFRTARLTRKPRTAACRRTTACSCDDGHGVALEATASRVNASRVGEGGWEGVAAADGAAAGGGEGWAAGGGEDNLELIPAAEDNLELIPGGEDNLELIPGVIRSMGIAVFSGEVIPLCRRLGSRVAALGA

SEQ ID NO: 79003 - protein, 100 aa, Zea mays
  Coding DNA Sequence Number=SeqID_37224
MWARASMLDRQMRRSRKGAQPWCGCMLPAWRSALSTTGFSEDGGMLITAGRLHASCAAIWLLSFWVSSHDVWDPAPASGGFETALNESVKNCKALAEAAE

SEQ ID NO: 79004 - protein, 67 aa, Zea mays
  Coding DNA Sequence Number=SeqID_37225
  Subcellular localization annotation: CTP_CleavageSite=57; ConfidenceScore=5.54e-01
MAGLRTARPSPVRWTDSHTPTGQQLRRIRRSSMEARARMSCNRRTGYYVQGNRTATCANVVSSRLQN

SEQ ID NO: 79005 - protein, 225 aa, Zea mays
  Coding DNA Sequence Number=SeqID_37226
  Homolog annotation: Hit_ID=Q6QP51; Match level="QueryCoverage=29%, HitCoverage=30%, E-value=7e-19, Identity=74%"; Hit description =Putative growth-regulating factor 1
  Subcellular localization annotation: CTP_CleavageSite=59; ConfidenceScore=5.36e-01
MQEACNRTTVVHPFGFVASGGPAWRPGPTCHVTSASVTTCKETAPPLAPMSRLLDCRTSAAVRGSPARDPTVPIKCNDHGASDTSGRQNGRRFTSVMMTASKKGPRKGIFRKRILLSEGNGPRALLLIRGSKVAPSGVRQPPQSTRALSPLLIRGSKAAPPEGFDSRPRACRARDDPGYVRYMAEARAMLPRYTRTFPRPTRTICNGISPEGGIEPSDPIEWVRV

SEQ ID NO: 79006 - protein, 172 aa, Zea mays
  Coding DNA Sequence Number=SeqID_37227
MHSVHHMLNEMHLLDVVWDEGLLDVEGLQGVQWEQPIQCGEYLIGVENLIILFKNYFRSRKLTSITVGVACKTNFSARIWDPAILDPLLSAIGYGAEVTQLGAIAYGAESLVFSALRLQGIGFDPRACTNKILVAIAVITASTATDKHKPNDLKTAYPLWTASSKAKFKTID

SEQ ID NO: 79007 - protein, 74 aa, Zea mays
  Coding DNA Sequence Number=SeqID_37228
MADKGKGKGIVIGDPRMSIISQKKIARKASGEKAKRFEDAGGYGAEVTQLGALAYGAEIEPVSACTALVRGISL

SEQ ID NO: 79008 - protein, 73 aa, Zea mays
  Coding DNA Sequence Number=SeqID_37229
MTGLSTQPINEKKISRLGAKICGAELRGRAAATSAPGQPWTQLAVAATSQLGAIGCGAELCYLGAIGYDAELR

SEQ ID NO: 79009 - protein, 68 aa, Zea mays
  Coding DNA Sequence Number=SeqID_37230
MTARSPQSHRGGESIRLSVATSFSSSVIGGGFGEELGAKICGAELRGRAAATSAPGQPWTQLAVAATS

SEQ ID NO: 79010 - protein, 55 aa, Zea mays
  Coding DNA Sequence Number=SeqID_37231
MTARSPQSHRGGESIRLSVATSFSSSVIGGGFGEELGAKICGAELRGRAAATSAP

SEQ ID NO: 79011 - protein, 546 aa, Zea mays
  Coding DNA Sequence Number=SeqID_37232
  Gene Ontology: Mol. function=helicase activity
  Homolog annotation: Hit_ID=Q1EPC6; Match level="QueryCoverage=67%, HitCoverage=25%, E-value=2e-96, Identity=46%"; Hit description=DNA helicase homolog, putative
MDGFFMENGEPTETDQMEHNDGRTPLTNISNTITMGKADENGSKRLGPNVDAKELSLSDGCSTIDFTNFATQVPNVNRDDDSDWLHRNETFKSDDVFTTRDLMTPGGVHETVGNTPNHNLGRAAYFRERYKNLTPAERELNRERLRLYNNTPKRKGSKIEYIRKRRALLADTLSQESIAMESPTYTPEVVHPTTDAIEPNGSALTPCDWVIPDIASNPFLPASTQTEDADSLRMSTRPLRRKQHVPRGERQAILARRNRQFEASISRNMATVAEDIISDAEEGDDWTQPHMSAKINNNVDGDDSVVFEDDADENEGYLFAGKYEDTDEDIEIDGSQDESSAIDVPDPYDKVYSNIPEETHMLKTVPNCGYCTTKKFEYETPGFCCRGGKVELAPLETPPQLKRLWDSADSDARHFRDNIRFFNGHFSFTSLYCCLDSMTTNVRDSGIYTFRAQGMMYHNIKSFGRDGGADHKHLELYFYDDDPTLEHRYRKCREEHQQKDKEVIRQIVDILRGNPYSEHLRTMGHVENLDDYRIALNLDQTLNQKT

SEQ ID NO: 79012 - protein, 1893 aa, Zea mays
  Coding DNA Sequence Number=SeqID_37233
  Gene Ontology: Mol. function=helicase activity; Biological process =viral genome replication
  Homolog annotation: Hit_ID=Q1EPC6; Match level="QueryCoverage=75%, HitCoverage=88%, E-value=0.0, Identity=71%"; Hit description=DNA helicase homolog, putative
  Pfam annotation: Domain name=DUF889; Domain location=1097-1333; Score= 460.3; E_value=2.4e-135; Accession=PF05970.5; Description=Eukaryotic protein of unknown function (DUF889)
  Pfam annotation: Domain name=Peptidase_C48; Domain location=1437 -1636; Score=-6.7; E_value=0.0018; Accession=PF02902.9; Description =Ulp1 protease family, C-terminal catalytic domain
  Pfam module annotation: Pfam domain module=DUF889::Peptidase_C48; Domain location=1097-1333::1437-1636
EDTDEDIEIDGSQDESSAIDVPDPYDKVYSNIPEETHMLKTVPNCGYCTAKKFEYETPGFCCRGGKVELAPLETPPQLKRLWDSADSDARHFRDNIRFFNGHFSFTSLYCCLDSMTTNVRDSGIYTFRAQGMMYHNIKSFGRDGGAEHKHLELYFYDDDPTLEHRYRKCREEHQQKDKEVIRQIVDILRGNPYSEHLRTMGHVENLDDYRIALNLDQTLNQKTYNTPLTSEVAAVWIEGSEGRGQFSKSVMLHGKDSSSHCIRSYHGCYDALSYPLFFPRGELGWHANIPKVGVSMDEVDAYRATHRASNANDEDAESPSHLCVSVRDYYCYKFQIRPGVFNPILHGKRLFQQFAVDTYIKIENSRLDYIRKNQDRLRADLYQGLVDSMLDGDIRGEKVGKRTVLSTSFIGGPRDMRRRYMDAMALVRKFGKPDIFLTMTCNPNWDEIRRELLLGQTPQDRPDLVVRVFHAKLQELKHRLTKQDILGKVRAYVYVVEFQKRGLPHAHFLLIMQRKYKLTCPEQYDLLISAEIPSNKYPELRKMVIKHMMHGPCGSLNPNCPCTKGRKSCKNHYPRSFSDTTLQGKDSYPIYRRRDDDRKEKVRGCELDNRWVVPYNPYLLRLFNCHINVEACGSIKAVKYLFKYIYKGHDRASVVMRDASKADDDVDEIKQYRDARWVTPPEALWRIYGFELSQISPPVMQLRLHLPNMHMVAFHERQMVERVVNRPGVDRSMLTSYFEENRLHEEARGILYRDFPEWYTWQSGKGKVWQRRKRDTGGQVGRIVSAHPAEGERYYLRVLLNHVTGAASYVDLRTVDGVTLPTFREAAERRGLLESDNTLDECLTERALFQMPSSLRRLFATILVYCEPSDVAVLWQKHKDSMSEDYQHKSQNKTHVEQMVLIDIRNMLQSMGKDIKTFPLPPMIDAYDDAIGTAREVYEEESIQSTVEDVSLKDSLNEEQRAAYDKIMSAVDTDQGGLFFVDGPGGTGKTYLYRVLLATLRNQGKIAVATATSGVAASIMPRGRTAHSRFKIPLTIDDGVVCSFTKQSGTAELLRKASLIIWDEASMTKRQAVEALDNSMRDIMGRPALPFGGKTIVFGGDFRQVLPVVRKGSRAQVVASSLRMSYLWESMSHLKLVSNMRAKNDPWFAEFLLRVGGGTEETNSDGDIRLPDDVCVPYSGSDNDLDNLIDFAFPNLNENMSDSTYITSRAILSTRNDWVDMINVKMIDRFQGEHMVYHSFDSAMDDPHNYYPPEFLNTLTPNGLPPHVLKLKIGCPVILLRNIDPANGLCNGTRLVVRGFQRNSIDAEIVLGQHVGKRIFLPRIPLCPSDEEMFPFQFKRKQFPVRLSFAMTVNKAQGQTIPNVGVYLPEPVFSHGQLYVALSRATARSNIKILVIPAVDGRKKSRKGVKKTPTVDCGTYTKNIVYKEACLIQAKKIVAPAIVREVLSHDWLLLDYICTQGDLALIDFIKEIPCEPRVEVVLIDDAFVERKWMECLFQPSAYLGDEVFIPINIRETHWYLVVIHARNMEIQVLDSLGTSQDRKDLTDSIKGLQRQIDMISQRKELKDHRWPDLQVASWPLREIDMGYAKQTDSSSCGLFLLNYIEYWSGDELSDSFTQEKMAAILLSSDLNKRRGCLLYKNEKEVDSGSPSDVEILENPTDSNKRKLLHVLDDSEVVYEDEEGPITQADLQRRTWVRSFNPFKIEISVKDLQNILKTTQDMILRCFDMAVRLLANKESRRPKEEIINNRKHYMDMRFWRMVGFGKLPKYHQDPTTEELAKTLDCWPSMNYYITGCRYVLMPWKFNGCHALFVIDHVKKHVTFIDFTPTQDWCKHMPYKRFAEVIIMASKKYKIAYNKKRSGWAEDIFKWEHTIQIGVPIDLRGYFLRTTFSAV

SEQ ID NO: 79013 - protein, 98 aa, Zea mays
  Coding DNA Sequence Number=SeqID_37234
MASKKYKIAYSKKRSGWAEDIFKWEHTIQTGVPIDLRGYLVLQAMAMWGNDRRMKFVGDAKIVRWSFVIDLLSYEDNSCRYVIPANIQQRLIDIAKKD

SEQ ID NO: 79014 - protein, 270 aa, Zea mays
  Coding DNA Sequence Number=SeqID_37235
  Homolog annotation: Hit_ID=Q6QP51; Match level="QueryCoverage=73%, HitCoverage=72%, E-value=2e-11, Identity=33%"; Hit description =Putative growth-regulating factor 1
MTASKKGPGKGDTPKRILPREGTRLRASLLIRGSKAGPSKGFNSRLRARGLHTHYWSEVRRPAPRKGSTAASGYSGSAPTTDQGNDLVTESHQREASSPRTPSPGDRVRQITRSSPETPCSAPIEGNMRLGGCSRKPGSGRTVDNVNIPARELGTRPYTRATASSHEGTTRPAEALREALRPRRSQTTPPRPRGLHPAGALARTHRNKTQPRKAGPLAKKCDESLQASANTPFEARGLLSGTIIRGTLKAPNSQLVTPISIKLQRPDGCD

SEQ ID NO: 79015 - protein, 449 aa, Zea mays
  Coding DNA Sequence Number=SeqID_37236
  Homolog annotation: Hit_ID=Q6QP54; Match level="QueryCoverage=12%, HitCoverage=19%, E-value=9e-17, Identity=85%"; Hit description =Putative kinase
MEDRLDLGFGGASMSPNLGRRPATSTGSAIITLPRADSGRKEPDRCPIWLSPPDRLRHSSDGHDITPVGFKDLSGCHIGIVGALAVGVTSVREGERESRATTLRMRALTLPFRDARRGSREEPELYLHANVAVGEVLEPCVRGVVAVGGAFEPCRSTVVGAVGTLLTSPCFRKGLRATVVMDARREPSLLGNDVPHAAWSVRAQGRARRRLLLRPRLGSGKDTIPPEVEVEAGPRGRARRRPPSEVEVEAVPWGRARRSPPSEVEAEPWGRARRSPPSKVEVEAEPWGRARRSFLWRLRLDSAAVSLTLAGGTTVGEGRVALFSCQVSQWEGEVTAVTLTLPTEARVCARAHPPGVAAEASEEWFDSSEAGLLTLSTVWPEPGLREQPTSLCIEREDDQGLTRLLSYAPSSPFRKEEGGSAMLPSEGAEHGVSSELLTGDPSGRPCPVR

SEQ ID NO: 79016 - protein, 84 aa, Zea mays
  Coding DNA Sequence Number=SeqID_37237
  Gene Ontology: Mol. function=kinase activity
  Homolog annotation: Hit_ID=Q6QP54; Match level="QueryCoverage=63%, HitCoverage=19%, E-value=1e-17, Identity=85%"; Hit description =Putative kinase
MEDRLDLGFGGASMSPNLGRRPATSTGSAIITLPRADSGRKEPDRCPIWLSPPDRLRHSSDGHDITPVGFKDLSGCHIGMYSGH

SEQ ID NO: 79017 - protein, 72 aa, Zea mays
  Coding DNA Sequence Number=SeqID_37238
MWASTLDEAARWDDLITGLRPMSYGAKGVPARCLVSVGPTTTAKASSEGLKKKEKDVEADLQEFQDFDEFED

SEQ ID NO: 79018 - protein, 93 aa, Zea mays
  Coding DNA Sequence Number=SeqID_37239
  Subcellular localization annotation: CTP_CleavageSite=38; ConfidenceScore=5.04e-01
MLDEAARWGDLVTGLRPMSYGAKGVLARCLVSVGPTTTAKASSEGWRLCLRPNTDFTGGPRSTSLDFGLSPPRVDRANREPRKNKETISPDQF

SEQ ID NO: 79019 - protein, 321 aa, Zea mays
  Coding DNA Sequence Number=SeqID_37240
MKILEAEGGTKIAAWLASPHPGAGGHRLGAEEAKLPRAVRATAQRLQAFLHFRPDQRVKGRTAMQAACNRTKWAHPFDSNASSMDAQAHTSCNRCAGCYTQETAPPLAPLPCLLDCGTSIATRGNPVYDPTVPTRHIGHGSINRGRRRDGQYGQKWAGSNGGGRRAEAAVKSSAKLTRHLWQEKRATLHLRHNDRVKKAGPSEGFNSRLRALGLRARYWSEVRGLAPQKGSTAASGHSDSAPTTDQGACYNGPDHTWASMLDEAARWDDLVTGLRPMSYGAKGVPARCLVSVGPTTTAKASSEGWRLRLRPNICPLRDQFD

SEQ ID NO: 79020 - protein, 51 aa, Zea mays
  Coding DNA Sequence Number=SeqID_37241
MTVTDKGENANKGRVDEGAVNDEMDEALSPNMDGNEETSKDRFNVSRKARE

SEQ ID NO: 79021 - protein, 129 aa, Zea mays
  Coding DNA Sequence Number=SeqID_37242
MLKGCLVFSSMRLGVPFIAPRCSRPIDAVLEDLLDLWVRTHTCFRCATPILLVDVDRIVFIGVLTDLEELEVAKWTGASGKNSEKRQNLQGVKEGGAVNDEIDEALSPNMDGNEETSKDRFNVSRKARE

SEQ ID NO: 79022 - protein, 90 aa, Zea mays
  Coding DNA Sequence Number=SeqID_37243
MVRRGHTARGLRSSRLTGLWEHGAHGPTGRTGLGQAVRAGCVPRRRCSRPIDAVLEDLLDLWVRTHTRFRCATLILLVDVDRIVFIGVSG

SEQ ID NO: 79023 - protein, 76 aa, Zea mays
  Coding DNA Sequence Number=SeqID_37244
MAVMGSTSEMMYLCQNPGGELTYARVKCYICRVIGDPQSSCSLSAIVCELRLSAVIITEMSEEGPQGGEIIKKQQD

SEQ ID NO: 79024 - protein, 161 aa, Zea mays
  Coding DNA Sequence Number=SeqID_37245
MAIRIDYTQLRISNHTTYVALNPCICQPATGVLKTGSGFKGGGVIKIKEVFLKKKKKRDKQNRADSGPDGPSLRENGTRPRPRGRFCAEALGVLTKPEQGRLLFSQVTDKSQKNPRVSVSSQGKVPDHGSARRGSGEHLRRPIKAMTGAPERQTPNPSYPE

SEQ ID NO: 79025 - protein, 82 aa, Zea mays
  Coding DNA Sequence Number=SeqID_37246
MDGMFSKIKLDGGSIMAMMGSTSKRMYLCQSGLKNPGGELTYARVKCYICRVIGDPQLGINRFGSPLVLEHEDLVTDLHVAF

SEQ ID NO: 79026 - protein, 122 aa, Zea mays
  Coding DNA Sequence Number=SeqID_37247
MGNNVQGLYVGRGRSLVNNMLLERAAATQIKGNTYTWVVLVRHFSKTGENHRFHIQPHVTEPPKSLGPPTVVLVQRTSDNPTGAPESLDKFAIYFSYLSQERFTRHADITSIGVTKVRKPLP

SEQ ID NO: 79027 - protein, 139 aa, Zea mays
  Coding DNA Sequence Number=SeqID_37248
MGFAPIPAVTEPPKSLGPPTVVLVQRTSDNPAGAPESLDKFGICFSYLSQERFTRHADIRSIGGFLRPDQVHANREHRYTTIQPLVTAGIPRKVIKFKEGNAGIVLAINSYHLMHQASEKEFKRIKEVANAPGLALVYK

SEQ ID NO: 79028 - protein, 91 aa, Zea mays
  Coding DNA Sequence Number=SeqID_37249
MGLSVCGLLCQGGDEDDGSGYAYGNENEEEVEIEEARATPPPLPEEPQAGNCFYFDICRAEPDSPITQGKPRCICHLLAILKSFSLALCIR

SEQ ID NO: 79029 - protein, 93 aa, Zea mays
  Coding DNA Sequence Number=SeqID_37250
MSSPHWLKRGCKAPEANGKIHGVAPKILLFTVHDKIIMLIGTWRTTRDHYFRSKTHVWGGFAQFHCRTSPIPKSGVRVHTVLTQGWYGTSLAD

SEQ ID NO: 79030 - protein, 160 aa, Zea mays
  Coding DNA Sequence Number=SeqID_37251
  Subcellular localization annotation: CTP_CleavageSite=54; ConfidenceScore=5.26e-01
MTTVPIDSLFASRPHRLGIQCSTDPGCRRAVTALVPTIASMGDPVSGRMRDKVRARLHSGTRFTGYHFSRHVLNTFKSLTQKLQLLTMYDLLELNKVNFTYVRPLGGILGKLGQTLSKWLGTGVCFTVPKIGDQKGRRGALNYNYYLTVGSSLKLIFAGF

SEQ ID NO: 79031 - protein, 166 aa, Zea mays
  Coding DNA Sequence Number=SeqID_37252
MSLVMRKWARPSPLLLMLLSCRSNIPLDRPTWWQGGRPSHTINYILHGTCKNGATSKAEYTNTQLDLTGYKESSSLISCEKQTIRIEFLNLARPHRLGIQCSTDPDCRRAVAALVPTIASMGDPVSGRMRDKVRARLHSGTRFTGYHFSRHVLSTFKSLTQVLARG

SEQ ID NO: 79032 - protein, 163 aa, Zea mays
  Coding DNA Sequence Number=SeqID_37253
MRKWARPSPLLLMLLSCRSNIPLDRPTRWQGGRPSHTINYILHGTCKNGATSKAEYTNTQLDLTGYKESSSLISCEKQTIRIEFLNLARPHRLGIQCSTDPDCRRAVAALVPTIASMGDPVSGRMRDKVRARLHSGTRFTGYHFSRHVLSTFKSLTQWLVTGV

SEQ ID NO: 79033 - protein, 138 aa, Zea mays
  Coding DNA Sequence Number=SeqID_37254
MSSVLRKWARPSPLLLVLLSCRSNNPLDRPTRWQGGRPSHTINQFLHGTCKNGATSKAEYTNTQLDLTVTALVPTIASMGDPVSGRMTDKVCARLHSGTRFTGYHFSRHVLSTFKSLTQWLVTGVFCSVSKLGDQKVL

SEQ ID NO: 79034 - protein, 140 aa, Zea mays
  Coding DNA Sequence Number=SeqID_37255
MGDPVSGRMRDKVRARLQSGTRFTGYHFSRHVLSTFKSLTQAGLGLIVRSQAKESCQLKYHIATGTLATAFFGAEGRRDLVLLFLGPDGFLLIIVTFYFNIGCCYMGGDRVTSLLADAQLHRMLILLSQILAYYKAYYSK

SEQ ID NO: 79035 - protein, 194 aa, Zea mays
  Coding DNA Sequence Number=SeqID_37256
  Subcellular localization annotation: CTP_CleavageSite=82; ConfidenceScore=5.18e-01
MSWSRRQRCRRGQRRSRLEKRLRRPRSRWLPRPRWCSSGGWSLARSSVSGTNLGVTLPRPRPGRCLRGTAGCGYGVTSRGVCSGRDPGGDPGCGGPSAVLASSFEVEILPPVSPSEAGPDPAEGGNDAEGAAAPSVDDLFVGSRIAYPSESYFSRKVMSEDSVIDIVEKARKSFQQKSFRALGPVRLAESLIRA

SEQ ID NO: 79036 - protein, 326 aa, Zea mays
  Coding DNA Sequence Number=SeqID_37257
MKPKGCTTVVRLYASCVAVRPFARWFRRGWGNAYNRGAPPCWRVGTLELVDGDFARDTWNASGESYLYKGIDPPGSRHASALPSCIAPFHLSSPRMGCTRVAFVLLPLEERDPAGVGASSDIARLQGFSSRSPAAVPHQWSSVGMITILVVGRSKSGCGLYPALSFKDVHHPGWGGGRTEMGPASAWAGDPLLPPAFGGEGHPPAVRRRRPPAMRGKVNCCCLTRVQLSVLHPGDCRAMRRRLLSPVLKRQPPLERLPTAAVVASAGETVSATCAPGLRLFGFNSWFSSPVRGRERRPFSSSNLRPFCDELKPEAAVSAWTEAESA

SEQ ID NO: 79037 - protein, 334 aa, Zea mays
  Coding DNA Sequence Number=SeqID_37258
  Homolog annotation: Hit_ID=Q6QP51; Match level="QueryCoverage=43%, HitCoverage=76%, E-value=1e-26, Identity=59%"; Hit description =Putative growth-regulating factor 1
MKILEAERCSKSANPHEVALLQQQQDEDNTGGSPHSHSKHHEQSLDRRAPGFPPSDAGAGSHMSCEWTRNRRSQTAAREAGNRPTVISVTPSSQKPAGERVGRYARGMQPYHGCAPFRLRRIWWVSVKARARMLCNRHNGYCVQGNRTTTRANVASSRLRSQCRDSRQPCDTSGRRSGRRFTSAMMTVSEKAGPSEGFDSRPRARRVRDDSGYVCYMAEARAMLPSHFALSLTDLTGKQRRSPRSDCCATHPGKADNSQVQPRAQQEALPRPTLGLGLGGGLRLARPQDSASAPALGGIASSPDPGLSLGRSLRLARPWARTDRATGDTSLPYP

SEQ ID NO: 79038 - protein, 281 aa, Zea mays
  Coding DNA Sequence Number=SeqID_37259
  Homolog annotation: Hit_ID=Q336B1; Match level="QueryCoverage=32%, HitCoverage=96%, E-value=2e-30, Identity=68%"; Hit description =Ribosomal protein S19
  Pfam annotation: Domain name=Ribosomal_S19; Domain location=190-267; Score=109.8; E_value=8.1e-30; Accession=PF00203.11; Description =Ribosomal protein S19
  Subcellular localization annotation: CTP_CleavageSite=60; ConfidenceScore=5.08e-01
MKWLLKFSGLGAAARDFSSRALWKGAFVDAFLARIKKNRENMNGVHSTGGSASVQSALPTAAAINAHVDPPRSSPPPPQSTPTRILEPPHRHGRSAITVAGVTWYFRQASWHRRPRPGTGHHADPLCSPWKGTICADLDRALHGKVHVVPWKGPTRHHSIGPNRHGSTLRALFHGRFSGLGVAARDFSSRALWKGAFIDAFLARIKKNRENMNGKKIWSRRSSILSEFVGSTVLIYNWKSHVRCKITEGKVGHKFGEFAFTQRRRPHRTITGKGNQGKGRK

SEQ ID NO: 79039 - protein, 583 aa, Zea mays
  Coding DNA Sequence Number=SeqID_37260
  Subcellular localization annotation: CTP_CleavageSite=73; ConfidenceScore=5.16e-01
MFHYVNSFCCRFVSTKEGVHSTGGSASVQSALPTAAAINAHADPPRSSPPPPQSMPTRILDPPHRHGRSAITVAGVTWYFGQKSWHRRPRPSTGHHADPLCSPWKGTIRADLDRALHGRSAWFHGRSDPAPFNRPKSTRIHSVLVVPWKITRELDHKSDTETMKWLLERLGPSTSHLLYSPALEQQLVISETKAPSNNNRKGKSRKGQKVKVEMCMKGVHSTGGSASVQSALPTAAEINAHADPPRSSPPPPQSTPTRILDPPHRHGRSAITVAGVTWYFGQASWHRRPRPGTGHHADPLCSPWKGTIRADLDRALHGRSAWFHGRSDPAPFNRPKSTRIHSARVVPWKITRELDHKSDTETMKWLLEFSGLGAAARDFSSRALWKGAFVDAFLARIKKNRENMNETKAPSNNNRKGKSRKGQKVKVEMCMKGVHSTGGSASVQSALPTAAAINAHVDPPRSSPPPPQSTPTRILEPPHRHGRSAITVAGVTWYFRQASWHRRPRPGTGHHADPLCSPWKGTICADLDRALHGRSTWFHGRSDPTPFNRPKSTRIHSARVVPWKITRELDHKSDTETMKWLME

SEQ ID NO: 79040 - protein, 206 aa, Zea mays
  Coding DNA Sequence Number=SeqID_37261
MDNGYMVRDTPRSMDGNLTVDMDIHRISDPTEPGVHSTGGSASVQSALPTAAAINAHADPPRSSPPPPQSMPTRILDPPHRHGRSAITVAGVTWYFGQKSWHRRPRPSTGHHADPLCSPWKGTIRADLDRALHGRSAWFHGRSDPAPFNRPKSTRIHSVLVVPWKITRELDHKSDTETMKWLLERLGPSTSHLLYSPALEQQLVIS

SEQ ID NO: 79041 - protein, 101 aa, Zea mays
  Coding DNA Sequence Number=SeqID_37262
MAREDDILQSTVNRYGPPWDVPDPCIYGLDLRVKSRTPSGTNRTLGHPAGGMPVHSGGRQYARAAAYVVLIITRPLPGKLPLHANATQTADIRAQGDCTGN

SEQ ID NO: 79042 - protein, 211 aa, Zea mays
  Coding DNA Sequence Number=SeqID_37263
MWAAPGLPCGQRRQYTLRCQQLGSRPPWESDGPLDTQTGPPGEVGGKLPLHANATQTTDIRVQGDCTGKVAPSITSVMSLGPHDGVQYPCKTLRPLLILGFRAGAFRHPAGDFLSDRHLITKTLWKLPKGTFPFLSISLFLVIYANTLESNQNKFNINANEDQIVFDYNLAYLDRSLPPLGLFLQIKFIFLSLSQTHLFRHIERYFKIRID

SEQ ID NO: 79043 - protein, 134 aa, Zea mays
  Coding DNA Sequence Number=SeqID_37264
  Gene Ontology: Mol. function=DNA binding
MAPGEAVELGGWRNNSLAADSAPGVALDALVDCAGVCCRAERTAAAAPGAGRLEARGMEEATSSMRKSLEAMSWCSTIWTMMPSEKTSKNLMSRPLPGAPNVGEEISDRVAECTRPKSYDEEGPKRFACYEIGG

SEQ ID NO: 79044 - protein, 124 aa, Zea mays
  Coding DNA Sequence Number=SeqID_37265
MRNTCLRYWTTKARSVAAVDICYGVGGVVVSLRPVLPPQPAAPFSDWRMVRVPLGLELFWLGFFACVLSPYISSGILPMSPPDAQVFVVSFSGNEQEDALAQLKSMKKRLKEAEEQYKVPKVHT

SEQ ID NO: 79045 - protein, 78 aa, Zea mays
  Coding DNA Sequence Number=SeqID_37266
  Subcellular localization annotation: CTP_CleavageSite=46; ConfidenceScore=5.24e-01
MRSPGLRYWTTKARSVAAVSICYGVGGGVVSLQQSCSGWTSFSACVVSPYKSRGILPMSLPDAQVFVVSFSGNEQVTD

SEQ ID NO: 79046 - protein, 108 aa, Zea mays
  Coding DNA Sequence Number=SeqID_37267
MRSPDAQVFVVSFFGNEQLLVLGLDWTAAACFACGAPALHCMQLMAREVEPPPGRTYIADLGVRIYGAEVLIDRKAHHLLFAEASKDVVDFFLKGKCALGPFLLYFGD

SEQ ID NO: 79047 - protein, 335 aa, Zea mays
  Coding DNA Sequence Number=SeqID_37268
MKVADGVKTGDWRGGHGLLAEEVRCESQSVRTREAGGWLGRVVRRVREATHVLASVHEPVVWSHGLLVYDRDGVKTCDWREDLASDEWPIEAATGRISAGGVWEGGSVDCPRSYPHAHAPHATAPRPARPHVRRALPNAVAKPPHDRAGESRNGRRETSAAQHPPPKRGGGKYLHLEWAASALVLGAATAARVNADAQRQSAPPLFVAGGSRFIGAPSLSDTSIDWAGGGGGTDSASEAPAMGAVQDQQQIELPLSPEDVPFAQVYRFVGDMFDADVPVPVEAHLQKLKEMDDITAKTVLLVLRNLENNLSVPQFERVTRLLSTYDPTRALSGQL

SEQ ID NO: 79048 - protein, 83 aa, Zea mays
  Coding DNA Sequence Number=SeqID_37269
MEVADGVKTGDWRGGHGLLTEEVRCESQSVRTREAGGWLGRVVRRVREATRVLASVHEPGVWSHGLLVYDRGGDTGVGERVRA

SEQ ID NO: 79049 - protein, 107 aa, Zea mays
  Coding DNA Sequence Number=SeqID_37270
MEVADGVKTGDWRGGHGLLAEEVRCESQSVRTREAGGWLGRVLRRVREATGVLASVHEPGVWSHGLLVYDRGELVCVLVRVEKRAGVCCGVGGWDVTTDMAWRLQMA

SEQ ID NO: 79050 - protein, 112 aa, Zea mays
  Coding DNA Sequence Number=SeqID_37271
  Homolog annotation: Hit_ID=Q69JG4; Match level="QueryCoverage=39%, HitCoverage=8%, E-value=2e-16, Identity=91%"; Hit description =Putative nodulin-like protein
MNNLGQMGVAMGYVDVSLFISMTSIWGFFGRIASGTISEHFINLRERSAISSVIDILVGEEVCSSLLSSGRNKHQATTVSIAGEGSAPRVSAGIQHLDTDIRIPRNIDRGEK

SEQ ID NO: 79051 - protein, 541 aa, Zea mays
  Coding DNA Sequence Number=SeqID_37272
  Homolog annotation: Hit_ID=Q69JG4; Match level="QueryCoverage=97%, HitCoverage=98%, E-value=0.0, Identity=67%"; Hit description =Putative nodulin-like protein
  Pfam annotation: Domain name=MFS_1; Domain location=108-462; Score= -9.1; E_value=0.00082; Accession=PF07690.6; Description=Major Facilitator Superfamily
  Pfam annotation: Domain name=Nodulin-like; Domain location=8-250; Score=399.5; E_value=4.9e-117; Accession=PF06813.4; Description =Nodulin-like
  Pfam module annotation: Pfam domain module=MFS_1::Nodulin-like; Domain location=108-462::8-250
MAGTRWGRWLGLVTAVWVQCISGNNYTFSNYSHALKTLMGLTQLQLNGLSVAKDVGKAFGLLAGLASDRVPTWLLLAVGSLEGLLGYGAQWMVVSGAVAPLPYWQMCVFLCLGGNSTTWMNTAVLVTCIRNFRRSRGPVSGLLKGYVGLSTAIFTDTCSALFADDPASFLVMLAVVPAAVCALAMVFLREGAAAADEDDDGRCFAAINSLAVAIALYLLAADLTGLGGGGGVVFVAVLLVLLASPAAVPAILAWKSWAETRKAANADLEEADSLAAAAPLLLVAKEARAPGERPRLGEEHTIAQTLTSLDFWLMFASFLMGVGTGLAVMNNLGQMGVAMGYVDVSLFVSMTSIWGFFGRIASGTISEHFIKTRGIPRPLWNAASQVLMAVGYIVMALAMPGSLFIGSVVVGICYGVRLAVTVPTASELFGLKYYGLVYNVLILNLPLGSFLFSGLLAGLLYDAEATAVPGGGNTCVGAHCYRLVFLIMALACVVGFGLDVLLCVRTKRVYAKIHESKRLSRSAVAERGKDGINLIDTVDCH

SEQ ID NO: 79052 - protein, 263 aa, Zea mays
  Coding DNA Sequence Number=SeqID_37273
  Homolog annotation: Hit_ID=Q69JG4; Match level="QueryCoverage=30%, HitCoverage=14%, E-value=1e-36, Identity=93%"; Hit description =Putative nodulin-like protein
  Pfam annotation: Domain name=Nodulin-like; Domain location=184-263; Score=-94.2; E_value=2.1e-05; Accession=PF06813.4; Description =Nodulin-like
  Subcellular localization annotation: CTP_CleavageSite=18; ConfidenceScore=5.21e-01
LPPLSPASRIPRTRQTTAAAYLAARPLPPASPVARQPSPQSHARPHPSDSPAEDPVAAEYPAARPPPRILVRIRALDMGFIMGGGLLHAELDAAIAGLARPNPPPRSPSRPRRIPRQPASLLIHSVANLPMPPPPLPYLLLLLLGTHGQAPSEPTRAGLNSKQASDWAGHFLQVFGKALMAGTRWGLGLVTAVWVQCISGNNYTFSNYSHALKTLMGLTQLQLNGLSVAKDVGKAFGLLAGLASDRVPTWILLAVGSLELRSL

SEQ ID NO: 79053 - protein, 131 aa, Zea mays
  Coding DNA Sequence Number=SeqID_37274
MHSLDCNLADGEYVLIPEQGPVQEEDQEQASEAAIEDLPAAPAVEGKPRYGGYKCGHCTAAAGVSGALYAKAVRPGRERGIDGDGCHVWGRSTLTCRTMQDVVDGVTWPTTLPPGWTVEWDVAPAGEEHEE

SEQ ID NO: 79054 - protein, 93 aa, Zea mays
  Coding DNA Sequence Number=SeqID_37275
MRPETGSPHASYGGYKCGHCTAAVGVSGALYAKAVRPGRERGIDGDGCHVWGRSTLTCRTMQDLVDGVTWPTTLPPGWTVEWDVAPAGEEHEE

SEQ ID NO: 79055 - protein, 93 aa, Zea mays
  Coding DNA Sequence Number=SeqID_37276
MRPETGFSHASYGGYKCGHCTAAAGVSGALYAKAVRPGRERGIDGDGCHVWGRSTLTCRTMQDVVDGVTWPTTLPPGWTVEWDVAPAGEEHEE

SEQ ID NO: 79056 - protein, 54 aa, Zea mays
  Coding DNA Sequence Number=SeqID_37277
MAWSNSDDGVGEPSENLNAILDPFLGAMGYGAEFTRLGAIDLGAELPAALSSTS

SEQ ID NO: 79057 - protein, 60 aa, Zea mays
  Coding DNA Sequence Number=SeqID_37278
MARVGSGGEANAPEQDAKLGAIDLGAELGATSTPRQLVDDSTADSSAPRSMAPRCVNSAP

SEQ ID NO: 79058 - protein, 69 aa, Zea mays
  Coding DNA Sequence Number=SeqID_37279
MGPTYQREPALASRTGDARTAEAWDLPLGAIDLGAELGATSTPRQLVDDSAAGSSAPRSMAPRCVNSAP

SEQ ID NO: 79059 - protein, 81 aa, Zea mays
  Coding DNA Sequence Number=SeqID_37280
MEVRETSIPEIAEGGWVSEQLGGVVWHDYRGPRRQRRRRLPENLNAILDPFLGAMSYGAEFTHLGAIDLDAELPAALSSTS

SEQ ID NO: 79060 - protein, 290 aa, Zea mays
  Coding DNA Sequence Number=SeqID_37281
MPSASSSSFSSLYIIGDSSRLRDDPIIEVGDIDENDSSDDALSGLGAERFASSFETQGSIDALCRKYGVPEEYSTVLPAGHERACSPPGFAVSVYAHALETSMPVPLHGFFCEVLGHFGVAPSQIAPNGWRAIASFVFRSHFIGVAVNYASFSLGYTLELEDKLAAREREANALRRELSQAKAELAGAKKATAEEVRGAREAVVRDFWGSTEQVVRFLEHALAVKLKCNFGPISRRHELWRRVYTARRHRSWRRATCRAVVHQLTRRRRGTELGAKIYDAELEYVTTKLV

SEQ ID NO: 79061 - protein, 356 aa, Zea mays
  Coding DNA Sequence Number=SeqID_37282
  Gene Ontology: Mol. function=diacylglycerol kinase activity; Cellular component=plasma membrane; Biological process=diacylglycerol metabolic process
  Homolog annotation: Hit_ID=Q5ZAU2; Match level="QueryCoverage=39%, HitCoverage=28%, E-value=3e-47, Identity=66%"; Hit description =Putative diacylglycerol kinase
  Pfam annotation: Domain name=DAGK_cat; Domain location=232-356; Score= 62.9; E_value=1.1e-15; Accession=PF00781.14; Description =Diacylglycerol kinase catalytic domai
MDALIYLRLTVLTFWLNTTTRLGVGVYMASMDEETICKNQVEQSLLITGFGYEHDDAWMTNINLFKEFTVLSTICTSEFSIILLGCPFFGVTVATTSNSFSTATTGAARYCFSPILTIMIRTCQEWRNKTMKTTTESRSWPSRLSRTCLFNTEKIDTKWLSCFDGSSDSNKQCLLPFVWTGLNNNYRMEGEAETVVGSCSKPCGPLEDYYIPDYILKPGAQQVLVDHAAPCPIVVFINSRSGGQLGSSLIKTYRELLNEAQVFYLSKEAPDKVLHRLYANLERLKMEGHILAVQIWRTLRLIVAGGDGTASRLLGVVSDLKLSHPPPVATVPLGTGNNLPFSFGWVLAKSSKMVSD

SEQ ID NO: 79062 - protein, 903 aa, Zea mays
  Coding DNA Sequence Number=SeqID_37283
  Gene Ontology: Mol. function=zinc ion binding; Cellular component =integral to membrane; Biological process=protein transport
  Homolog annotation: Hit_ID=P93231; Match level="QueryCoverage=94%, HitCoverage=96%, E-value=0.0, Identity=64%"; Hit description =Vacuolar protein sorting-associated protein 41 homolog
  Pfam annotation: Domain name=Clathrin; Domain location=623-770; Score= 4.0; E_value=0.0017; Accession=PF00637.10; Description=Region in Clathrin and VPS
  Pfam annotation: Domain name=WD40; Domain location=138-179; Score =0.3; E_value=34; Accession=PF00400.22; Description=WD domain, G-beta repeat
  Pfam annotation: Domain name=WD40; Domain location=185-220; Score =5.4; E_value=8.6; Accession=PF00400.22; Description=WD domain, G -beta repeat
  Pfam annotation: Domain name=WD40; Domain location=97-135; Score =34.5; E_value=3.6e-07; Accession=PF00400.22; Description=WD domain, G-beta repeat
  Pfam module annotation: Pfam domain module=Clathrin::WD40::WD40::WD40; Domain location=623-770::138-179::185-220::97-135
MSTAPARRARPPLPLQNGAEGDDEREEEVDEEEVGDDEAEEEEDDDDEEEPRLKYQRLGGSVPAILSTDAAAAIAVADRMVALGTHNGTLHILDFQGNQVKEIAAHTATINDISFDADGEYIGSCSDDGTVAINSLFTDEKLKFEYHRPMKAIALDPNYARNYRRFATGGLAGQVLVLTKKSWGGYHKKVLRDGEGPIHSMKWRADLLAWANDAGVKVHDMRTDKGIAFIERPKGIHRPEFLLPHLVWQDDTVLVVGWGTSVKIAAIRTDLSQGLNGLQRTITTASSEKYVDIVGSFQTGYHISGVAPFGDLLVVLAYIPDEDEKEKTFSTSVTSRQGTAQRPEIHLVSWKNDELTTDALPIHGYEHYKAKDYALAHAPFSGSSNAGGQWAAGDEPLYYIVSPKDIVVAKPRDAEDHIAWLLQHGCHEKALAAVEAGQGRTELLDEVGSRYLDHLIIERKYAEAAQRCPKLLRGSPSAWERWVFHFAHLRQLPVLVPYIPTENPQLSDTAYEVALVALTTNPSFHELLLTTIKNWPPTLYSASPVISAIEPQLNSSSMADSLKESLAELYVINGQYEKALSLYAELLKPEVFEFIEKYNLHDAIHDKIVNLMIVDNKRTVHLLIQHRDIIPPYEVVEQLLHTSKKCDKRYLLHLYLHALFEIDIHAGKDFHDMQVELYADYETRMLLPFLRTSQHYRLDKAYEIFAQKELVREQVFVLGRMGNAKEALSTIINKLEDMQEAVEFVTEQHDDELWEELIRQCLQKPEMVGNLLEHTVGNLDPLYIVSLVPDGLEIPRLRDRLVKIVTDYRTETSLRNGCNDILKADCVNLLVKYYHEARRGVYMDISVIVFYCCHAYHLSCLEGGLDSMRSNSGQDSDGGMDDEDGSPSGQSRMRCVLCTTAAS

SEQ ID NO: 79063 - protein, 977 aa, Zea mays
  Coding DNA Sequence Number=SeqID_37284
  Gene Ontology: Mol. function=zinc ion binding; Cellular component =integral to membrane; Biological process=protein transport
  Homolog annotation: Hit_ID=P93231; Match level="QueryCoverage=84%, HitCoverage=96%, E-value=0.0, Identity=60%"; Hit description =Vacuolar protein sorting-associated protein 41 homolog
  Pfam annotation: Domain name=Clathrin; Domain location=724-871; Score= 4.0; E_value=0.0017; Accession=PF00637.10; Description=Region in Clathrin and VPS
  Pfam annotation: Domain name=WD40; Domain location=198-236; Score =34.5; E_value=3.6e-07; Accession=PF00400.22; Description=WD domain, G-beta repeat
  Pfam annotation: Domain name=WD40; Domain location=239-280; Score =0.3; E_value=34; Accession=PF00400.22; Description=WD domain, G-beta repeat
  Pfam annotation: Domain name=WD40; Domain location=286-321; Score =5.4; E_value=8.6; Accession=PF00400.22; Description=WD domain, G -beta repeat
  Pfam module annotation: Pfam domain module=Clathrin::WD40::WD40::WD40; Domain location=724-871::198-236::239-280::286-321
  Subcellular localization annotation: CTP_CleavageSite=67; ConfidenceScore=5.65e-01
METRPRTRPAPSSHTHTTTTSRRPAPGAWLSWVASLARSPAQRPSRTRLGRTRCTGLVFTGVHDTSMDEHRGKGSSYTRALGFTGNRPRDGRSRGPAGGERMSTAPARRARPPLPLQNGAEGDDEREEEVDEEEVGDDEAEEEEDDDDEEEPRLKYQRLGGSVPAILSTDAAAAIAVADRMVALGTHNGTLHILDFQGNQVKEIAAHTATINDISFDADGEYIGSCSDDGTVAINSLFTDEKLKFEYHRPMKAIALDPNYARNYRRFATGGLAGQVLVLTKKSWGGYHKKVLRDGEGPIHSMKWRADLLAWANDAGVKVHDMRTDKGIAFIERPKGIHRPEFLLPHLVWQDDTVLVVGWGTSVKIAAIRTDLSQGLNGLQRTITTASSEKYVDIVGSFQTGYHISGVAPFGDLLVVLAYIPDEDEKEKTFSTSVTSRQGTAQRPEIHLVSWKNDELTTDALPIHGYEHYKAKDYALAHAPFSGSSNAGGQWAAGDEPLYYIVSPKDIVVAKPRDAEDHIAWLLQHGCHEKALAAVEAGQGRTELLDEVGSRYLDHLIIERKYAEAAQRCPKLLRGSPSAWERWVFHFAHLRQLPVLVPYIPTENPQLSDTAYEVALVALTTNPSFHELLLTTIKNWPPTLYSASPVISAIEPQLNSSSMADSLKESLAELYVINGQYEKALSLYAELLKPEVFEFIEKYNLHDAIHDKIVNLMIVDNKRTVHLLIQHRDIIPPYEVVEQLLHTSKKCDKRYLLHLYLHALFEIDIHAGKDFHDMQVELYADYETRMLLPFLRTSQHYRLDKAYEIFAQKELVREQVFVLGRMGNAKEALSTIINKLEDMQEAVEFVTEQHDDELWEELIRQCLQKPEMVGNLLEHTVGNLDPLYIVSLVPDGLEIPRLTVFNLLVKYYHEARRGVYMDISVIVFYCCHAYHLSCLEGGLDSMRSNSGQDSDGGMDDEDGSPSGQSRMRCVLCTTAAS

SEQ ID NO: 79064 - protein, 41 aa, Zea mays
  Coding DNA Sequence Number=SeqID_37285
  Homolog annotation: Hit_ID=Q8S980; Match level="QueryCoverage=92%, HitCoverage=4%, E-value=2e-10, Identity=94%"; Hit description=Auxin response factor 6b
MSGEQRCLNSELWHACAGPLVSLPVVGSRSSTFLRAIVSSY

SEQ ID NO: 79065 - protein, 156 aa, Zea mays
  Coding DNA Sequence Number=SeqID_37286
  Homolog annotation: Hit_ID=Q2EN88; Match level="QueryCoverage=57%, HitCoverage=32%, E-value=2e-15, Identity=62%"; Hit description =Guanylyl cyclase-like protein
MACMRRAPCVPACGWEPVVYFPQGHSEQIINLVRRLLSHDNQVQEVSRIPNGSNPGNCISLLREQLQKVLDAGISIKVWSISAYGIGFLLLSGHCIAIALVDKLKLKLRYWHNIIITIISKEVYHAGVIMMYNSTMRSQTTWHCRIIDDQHAGSVV

SEQ ID NO: 79066 - protein, 355 aa, Zea mays
  Coding DNA Sequence Number=SeqID_37287
  Homolog annotation: Hit_ID=Q2EN88; Match level="QueryCoverage=25%, HitCoverage=32%, E-value=2e-15, Identity=62%"; Hit description =Guanylyl cyclase-like protein
MACMRRAPCVPACGWEPVVYFPQGHSEQIINLVQRLLSHDNQVQEVSRIPNGSNPGNCISLLREQLQKVLDAGISIKVWSISAYGIGFLLLSGHCIAIALVDKLKLKLRYWQNIIITIISKEVYHVGVIMMYNSTMRSQTTWPSDPAHTRRSLSHPVFRRQLATVRRKQRAPVPLPRSPSPSLCPHIPSHDTETMTTHTAEELATQIEQQKLEEQKTEPRNKALALSKGVEQIWGIGVDLGWGTKWRLGTLRWVVEEESEGGRRGCLAEPRGEGERHLQGHNLGETATMSVPHGRRQDLELAIDDFDEELIDHELRYSFQRNSKSIQQTLALLTYRNLFGIAIRLPVMLLRDRRA

SEQ ID NO: 79067 - protein, 103 aa, Zea mays
  Coding DNA Sequence Number=SeqID_37288
MEDNQTPLPWQHFPPSELHPWREANAAQLTVQGAHKIPAASSTADLRSPNFARCRLAVLWSPMDSAPSTPALMVDVVPCPFDEIPSHVDGHASSHDPFRLIEL

SEQ ID NO: 79068 - protein, 165 aa, Zea mays
  Coding DNA Sequence Number=SeqID_37289
MAPSSLALAPCRRAADAPFSSFPACRQPFSLRAVAPWADLGEVQVHGDAAAPFLHGQPPSVAAELQLRSAATAPRIPCARAQAPFLLPLSGAQQHPCAALLLHFLPIFPTKRHPQRVAVAHGRAPFLPGRPAHCPGRSENSSSELHRRSAQQVARRSSMLLRLAR

SEQ ID NO: 79069 - protein, 165 aa, Zea mays
  Coding DNA Sequence Number=SeqID_37290
MAPSSLALAPCRRAADAPFSSFPACRQPFSLRAVAPWADLGEVQVHGDAAAPFLHGQPPSVAAELQLRSAATAPRIPCARAQAPFLLPLSGAQQHPCAALLLHFLPIFPTKRHPQRVAVAHGPSPLPPWPPSSLSGRSENSSSELHRRSAQQVARRSSMLLRLAR

SEQ ID NO: 79070 - protein, 47 aa, Zea mays
  Coding DNA Sequence Number=SeqID_37291
MGSYSWLRYFTQGATTIVFRNLSGLLRIKLHLAIPALVFPPLAEPRP

SEQ ID NO: 79071 - protein, 45 aa, Zea mays
  Coding DNA Sequence Number=SeqID_37292
MGSYSWLRYFTQGATTIVFRNLSGLLRIKGDAGDFDEDFIDDDDF

SEQ ID NO: 79072 - protein, 45 aa, Zea mays
  Coding DNA Sequence Number=SeqID_37293
MGSYSWLRYFTQGATTIVLETLSGLLRIKGDAGDFDGDFIDDDDF

SEQ ID NO: 79073 - protein, 58 aa, Zea mays
  Coding DNA Sequence Number=SeqID_37294
MGKPIPSLLMLLLSGVSHQSKAEINNWAISHRKMTGASLDLEIIVVDKISIKVSSITL

SEQ ID NO: 79074 - protein, 82 aa, Zea mays
  Coding DNA Sequence Number=SeqID_37295
MGSYSWLRYFTQGATTIVFRNLSGLLRIKRVMLETLMEILSTTMISKSNDAPVIFLWEIAPVIYIPLYFDVILVKDTMIQMM

SEQ ID NO: 79075 - protein, 113 aa, Zea mays
  Coding DNA Sequence Number=SeqID_37296
MRVVWDALGQGSSEDAREKLRSETLEVFKGPYNPRQKGSQLMGKTKARIVVSKKARKEARSSSLYQEALIANQSIDTEVVLQDMRGPDSPEPVVDLILEKGFNLSEQMSYDPA

SEQ ID NO: 79076 - protein, 122 aa, Zea mays
  Coding DNA Sequence Number=SeqID_37297
MVASVMAPIISLRDLGTGIVPRLFPEVGGIGFGTSDGRYAMVIFNIRILRTLGKSHVVKPCLLTLEVFKGPYNPRQKGSRLMGDNEDDGFDYVYGCPHCNHYSGEDGVMEEDFQEFQEYDEF

SEQ ID NO: 79077 - protein, 98 aa, Zea mays
  Coding DNA Sequence Number=SeqID_37298
MALGVVASSPSEQGLRLFPECLSVRTCSGSDTPGKQCNHEGEASVMAPIFSLRDLRTGIVPRLFLEGRGCLWCNLCSGKEEDVEADLQEFQDFDEFED

SEQ ID NO: 79078 - protein, 121 aa, Zea mays
  Coding DNA Sequence Number=SeqID_37299
MSRRGKSAKQSLWKFRKGPLTGTAFDPLPLPSGVPVPMCFCGDPCKVDKSEDHDTYRQGYWMCANFAFEPTIVQRRMNLMTPPPLCDFEQWIDKEISEKDKKWLDNLKKWDAEDKERMEKR

SEQ ID NO: 79079 - protein, 251 aa, Zea mays
  Coding DNA Sequence Number=SeqID_37300
MDPMLGAIIIGAEPVCAGANNIGVQTSDGGMTRNLRGTYLGAIDLGAEVGASGQRRLPRRQDIWRRDFSLIYRMSRRGKSAKQSLWKFRKGPLTGTAFDPLPLPSGVPVPMCFCGDPYKVDKSEDHDTYRQRYWMCANFAFEPTIVQRRMNLMTPPLLCDFEQWIDTEISEKDKKWLDNLKKWDAEDKERMEKRREELAAEQQREDEQKMRHVAECREEKEKKLERARRAKEAMEENPDAFRKGKWPCCTQ

SEQ ID NO: 79080 - protein, 290 aa, Zea mays
  Coding DNA Sequence Number=SeqID_37301
  Gene Ontology: Mol. function=transferase activity, transferring glycosyl groups; Biological process=metabolic process
  Homolog annotation: Hit_ID=Q2R1N0; Match level="QueryCoverage=43%, HitCoverage=25%, E-value=2e-28, Identity=56%"; Hit description=UDP -glucoronosyl and UDP-glucosyl transferase family protein, expressed
MHGLRDNVPARHFAEHLQHQLKAAGLGVLIQKTTSFATARDIAVSARCLFMPMNLHMLSLVVHLSELAASLPGEFGDLAEPVRLPGCVPILGPDIVSSLQDRFDPSYVVMLHLVVRCREAAEAILVNSFDAIKPEAVEVLRHPAKSDRPPVRVMGDLVVTCKWSYRERECESESDEMVDDEDSNDVLHSRLGLLDLEEALLLLGVDAGASASTAARARAKPIEEGVRGRGMADLLDLKTWRARRTGLTKVHGAGQEIAPRSRGAVPLSAREWGRTGGGTVKPCGRPRAGS

SEQ ID NO: 79081 - protein, 163 aa, Zea mays
  Coding DNA Sequence Number=SeqID_37302
MTLLDEYAKTSRLELVLQVLGEMPSRNVVSQTMHVASLVRGGQWHYTLFPPVWPTTPMPTRSCSRQCPRPRPRSLTSLATRGIEHVFKIVMICSNELEASIHCNLCGTRVLFEKANEILMEERNVQIMFISHRSKSHGMFYVQMAKTMEGQYFLCVKPKKFSQ

SEQ ID NO: 79082 - protein, 446 aa, Zea mays
  Coding DNA Sequence Number=SeqID_37303
  Gene Ontology: Mol. function=oxidoreductase activity, acting on the CH-OH group of donors, NAD or NADP as acceptor; Cellular component =mitochondrion; Biological process=metabolic process
  Homolog annotation: Hit_ID=Q9ZRI8; Match level="QueryCoverage=66%, HitCoverage=79%, E-value=1e-153, Identity=88%"; Hit description =Formate dehydrogenase, mitochondrial precursor
  Pfam annotation: Domain name=2-Hacid_dh; Domain location=112-432; Score=32.6; E_value=1.4e-06; Accession=PF00389.20; Description=D -isomer specific 2-hydroxyacid dehydr
  Pfam annotation: Domain name=2-Hacid_dh_C; Domain location=223-402; Score=233.6; E_value=4.2e-67; Accession=PF02826.9; Description=D -isomer specific 2-hydroxyacid dehydr
  Pfam module annotation: Pfam domain module=2-Hacid_dh::2-Hacid_dh_C; Domain location=112-432::223-402
METSRTSRDGARSTPAAGGWDRCPALAVVAPLVEARLRSPAIYVVQVRVLCEKANEILMEERNVQCSDVLSYNVAVCNVSARRLAGPDDLHDLASPEAVVSSNWIHDLYSRKLLVRYAFRKKEKEGLQTSRDVYCLECTAKMHRDCHKTELEKHIEDMHVLITTPFHPAYVTAERIKKAKNLELLLTAGIGSDHIDLPAAAAAGLTVAEVTGSNTVSVAEDELLRILILLRNFLPGYQQVVQGEWNVAGIAHKAYDLEGKTVGTVGAGRIGRLLLQRLKPFNCNLLYHDRLQIDPELEKEIGAKFEEDLDAMLPKCDVIVINTPLTEKTRGMFNKERIAKMKKGVIVVNNARGAIMDARAVADACSSGHIAGYGGDVWFPQPAPKDHPWRYMPNHAMTPHISGTTIDEQLRYADGVRDMLDRYFKGEDFPVQNYIVKEGQLASQYQ

SEQ ID NO: 79083 - protein, 234 aa, Zea mays
  Coding DNA Sequence Number=SeqID_37304
  Gene Ontology: Mol. function=unfolded protein binding; Cellular component=chloroplast; Biological process=cellular protein metabolic process
  Homolog annotation: Hit_ID=Q8GVI0; Match level="QueryCoverage=30%, HitCoverage=16%, E-value=4e-23, Identity=72%"; Hit description =Putative eIF3e
MEQQTHDRAAGEERDGTGERGNGARAATLSRPHTAYSGRFDVPDRRFLPPTTAFSSSSQKLLPRSAGVDRRLVVWAYVKFISTGEACRRGLAAGIDKLANAVSVTLGPKGRNVVIDQDDVPKVINDGVTIAKAIELPNALEHAGATLLQEERQFYSESEILEAKIRLLNGTNMVDYAMDIHKSLYDTDDVLEDMVKRRAEVVSRLRSLEEAAAPLVAFLQNPLVAPFRFMFFQL

SEQ ID NO: 79084 - protein, 229 aa, Zea mays
  Coding DNA Sequence Number=SeqID_37305
  Homolog annotation: Hit_ID=Q9LJD8; Match level="QueryCoverage=29%, HitCoverage=4%, E-value=1e-22, Identity=83%"; Hit description=MAP3K epsilon protein kinase
MVKRRAEVVSRLKSLEEAAAPLVAFLQNPRLVQEFRLVVSRLRYVENGSLSNIIKPNKFGPIPESLVALYIAQFLYDQVLEGLVYLHEQGVIHRDIKGANILSTKEPLKFELHFHITDTIIGCFEAGCDYITVLGVDFMSENVRAVIDQAGFNKSHMEALRAEPVAEGEMPASSSSSHQFLKSVGIKTSASSKSSSSNQSELREQLAAEATAAVQGELDQLRKKCEVKW

SEQ ID NO: 79085 - protein, 119 aa, Zea mays
  Coding DNA Sequence Number=SeqID_37306
  Subcellular localization annotation: CTP_CleavageSite=15; ConfidenceScore=5.17e-01
MTCHTNSKRGLSEPSREALSSSHQFLKSVGIKTLASSKSSSSNQSELREQLAAEATTAVQGELDQLRKKCEEAEEQQARTQRELEEYKMITEKNSKEMEETNVLIKKLLSLHGNASSST

SEQ ID NO: 79086 - protein, 92 aa, Zea mays
  Coding DNA Sequence Number=SeqID_37307
MDSNFNSNLVIRQLLHSMFVQLREHTLESLFLSRVRKRQIFVAFAPRWFLKKKNKTEVREDSVLHIGSFAYNLSGGVCASLGLYNITTLHSL

SEQ ID NO: 79087 - protein, 167 aa, Zea mays
  Coding DNA Sequence Number=SeqID_37308
  Subcellular localization annotation: CTP_CleavageSite=23; ConfidenceScore=5.10e-01
MTSSNPAASFKSRPGQAVAPTTNCTPRPTKHLRGDLMEPPEREEEIEVIEEKTPPPSESQAGNCFYFDICGSEPDSPVNEGKPRRADRGPFNWSHASSWHTLESLFLSRVRKRQIFVAFAPRWFLKKKNKTEVREDSVLHIGSFAYNLSGGVCASLGLYNITTLHSL

SEQ ID NO: 79088 - protein, 106 aa, Zea mays
  Coding DNA Sequence Number=SeqID_37309
MEREEEIEVTEEKTPPPSESQAGNCFYFDICGSEPDSPVNEGKPRRADRGPFNWSHASSWHTLESLFLSRVRKRQIFVAFAPRWYQMKKNKTEVREDLVLHIGSFA

SEQ ID NO: 79089 - protein, 86 aa, Zea mays
  Coding DNA Sequence Number=SeqID_37310
  Subcellular localization annotation: CTP_CleavageSite=31; ConfidenceScore=5.06e-01
MKLWKETSRSSKTTTSSRSGLAATPSRLPVKAAVIYVSFPHFDLFWGRQILDGRLWCWLLDYLLSNSLLRNEDVLSVSEITVYRMQ

SEQ ID NO: 79090 - protein, 104 aa, Zea mays
  Coding DNA Sequence Number=SeqID_37311
MQYNGSSSLISCEKQTIRIEFYPCKIRAHRLGVQCLTDPDCRRAVTALVPTITEMGDHVSGRVRGKILDGRLWCWVLDYLMSNSLLRNEDVFLVSEITVYRSNE

SEQ ID NO: 79091 - protein, 149 aa, Zea mays
  Coding DNA Sequence Number=SeqID_37312
MIVQKCLIRSTIERKREILGRIDNVQPKPSKDLREHTNIIKEYCNLADGEYILVPEQGVAQEVCNVHLSVGVVWNLSCMTQEYLLRWILAQLVLLANQTPQPNICMSRGRGVDSSHRFSGGHDCWSDLAIRLAIGLDSRVGPYLGRGGA

SEQ ID NO: 79092 - protein, 229 aa, Zea mays
  Coding DNA Sequence Number=SeqID_37313
  Subcellular localization annotation: CTP_CleavageSite=68; ConfidenceScore=5.56e-01
MSPARARAYKASQGFSRMPPRALDLTEARDRRSLPCTRRASTRPSTHHRRSANRAIPSPVQPSRETLRASVKLPEQGIELCLAGDAGSRSPDFTRPSASVDRAPRFKVKKNRKDCNLADGEYILVPEQGVAQEVCNVHLSVGVVWNLSCMTQDTFEMDTSMLGRVAATLIRDLGRSRVIFLALAQGQEIGCIHFDNRMMMVCGHGSMGMRGLRDEIGIRINVRIPVSSV

SEQ ID NO: 79093 - protein, 110 aa, Zea mays
  Coding DNA Sequence Number=SeqID_37314
MGKPVPSLLMLLLNRGRVPLDCPARCTMDQAVSLAARSRRFKSSFYPCKYIQTLDTGIRTLILIPFSSRRPRIPMDPCPQTIIILLSKWIQPIPDLARVLEKSLDFYRDP

SEQ ID NO: 79094 - protein, 66 aa, Zea mays
  Coding DNA Sequence Number=SeqID_37315
MAAGFNDCGFYVMGYILFYQCDEGSLRSDIEAGNTSEIRSLALHYITFHPKNKALSLLEDIQRFKV

SEQ ID NO: 79095 - protein, 673 aa, Zea mays
  Coding DNA Sequence Number=SeqID_37316
  Gene Ontology: Mol. function=cysteine-type peptidase activity; Biological process=proteolysis
  Homolog annotation: Hit_ID=Q53MK8; Match level="QueryCoverage=22%, HitCoverage=15%, E-value=2e-13, Identity=29%"; Hit description=Ulp1 protease family, C-terminal catalytic domain, putative
MEKLDPNDMTIRAGPGKELKITKDTVHLILGLPNAGGGTALGIDEAVVANNLRAELGLSKEDFGVTALQDRLRKGSDDDLSIRCFFLILFNRLLFPTASWGITNHEVLLTEQMDRFHQIDWCQLIFNDLCQAAKKWHNRSVTNVSTTIYGCSIVILHKTRTNAFDVPRPDPSGQHSIHIELPLIRDLISSKLNQLPSRHRMGFIEKLSHFDAEVGKACSVIKQNLQQIVEKQFNLSDVFGELIDEVLRAEAGDNEDAYDVQKTTSKSDDILPQTAEGCTCPAPPTVPDMSTPVSQLDTQFTDTQGKHGDGGKNMPTNTNVTPKATPHMDPDAPIFDATPQIKSTGGVQQVAETDLPDSGPCFDQTPSEHVYVETDPATNTPQVGQASLDSEMQTVLALREYLCGLQSDTGRTIIDYGEYSATCSDIYESFADGKCLDNGFMQCFIQCVIHDAKNQQTSMSSNSLVLDVNVGSILNFEEQERHSRNPQPFDESVLHTLLDNSLPETDELDQYKAIMVPMVSRGHWTLYVVNKVKKCIHILDSNPYGPTLGGTTWKDYHFAHLGSGGRKLPWAKVIMSRLNKAIQHVRPSSCFPKFGNFTIDLCQNCPNMVAGSNDCGFYVMGYILFYQCDEGSLRSDIEAGNTSEIRSLALHYITFHPKNKALSLLQDIQRFKV

SEQ ID NO: 79096 - protein, 814 aa, Zea mays
  Coding DNA Sequence Number=SeqID_37317
  Gene Ontology: Mol. function=cysteine-type peptidase activity; Biological process=proteolysis
  Homolog annotation: Hit_ID=Q53MK8; Match level="QueryCoverage=89%, HitCoverage=77%, E-value=1e-28, Identity=22%"; Hit description=Ulp1 protease family, C-terminal catalytic domain, putative
MKNVDRPPSNPKRIIIQSTQECFSVDIPRAPAGTVRPETRRAADEDDDFMPSSKKRNLDDSPGKVLKKVVTKRRKAVPHPDSRSHLAWLMEKLDPNDMTIRAGPGKELKITKDMVHLILGLPNAGGGTALGIDEAVVANNLRAELGLSKEDFGVTALQDRLRKGSDDDLSIRCFFLILFNRLLFPTASWGITNHEVLLTEQMDRFHQIDWCQLIFNDLCQAAKKWHNRSVTNVSTTIYGCSIVILLYYLDHLHDSAAPLNKRGTPRIKYFDRNIIQALTRADKGKIHKGEEAFGHCSHKTRTNAFDVPRPDPSGQHSIHIELPLIRDLISSKLNQLPSRHRMGFIEKLSHFDAEVGKACSVIKQNLQQIVEKQFNLSDVFGELIDEVLRAEAGDNEDAYDVQKTTSKSDDILPQTAEGCTCPAPPTVPDMSTPVSQLDTQFIDTQGKHGDGGKNMPTNTNVTPKATPHMDPDAPIFDATPQIKSTGGVQQVAETDLPDSGPCFDQTPSEHVYVETDPATNTPQVGQASLDSEMQTVLALREYLCGLQSDTGRTIIDYGEYSATCSDIYESFADGKCLDNGFMQCFIQCVIHDAKNQQTSMSSNSLVLDVNVGSILNFEEQERHSRNPQPFDESVLHTLLDNSLPETDELDQYKAIMVPMVSRGHWTLYVVNKVKKCIHILDSNPYGPTLGGTTWKDYHFAHLGSGGRKLPWAKVIMSRLNKAIQHVRPSSCFPKFGNFTIDLCQNCPNMVAGSNDCGFYVMGYILFYQCDEGSLRSDIEAGNTSEIRSLALHYITFHSKNKALSLLQDIQRFKV

SEQ ID NO: 79097 - protein, 102 aa, Zea mays
  Coding DNA Sequence Number=SeqID_37318
  Subcellular localization annotation: CTP_CleavageSite=83; ConfidenceScore=5.39e-01
MAPPPPCVTSALLLPWLGYYAKQRQQFPWTTPRNSSRAHPIFFPPWPKVPPAASSATMASSPRQRAPPLLCCRTSLPLPRSLVAQRAPSPTYAASCALQQQP

SEQ ID NO: 79098 - protein, 113 aa, Zea mays
  Coding DNA Sequence Number=SeqID_37319
  Subcellular localization annotation: CTP_CleavageSite=26; ConfidenceScore=5.57e-01
MASSPRQRAPPLLCCRTSLPLPRSLVAQRAPSPTCAASCTLQQHAVMPAGGLLFLRSPVVVVVHPGETPRVLRGEEGKPLDAHRCSERCTNRNRHRPYKHRLGLFMICAIEKW

SEQ ID NO: 79099 - protein, 113 aa, Zea mays
  Coding DNA Sequence Number=SeqID_37320
  Subcellular localization annotation: CTP_CleavageSite=26; ConfidenceScore=5.56e-01
MASSPRQRAPPLLCCRTSLPLPRSLVAQRAPSPTCAASCMLQQHAVMPAGGLLFLRSPVVVVVHPGETPRVLRGEEGKPLDAHRCSERCTNRNHHRPYKHRLGLFMICAIEKW

SEQ ID NO: 79100 - protein, 80 aa, Zea mays
  Coding DNA Sequence Number=SeqID_37321
MGLPLSLTKFDPKLLSIPPESSNCNLADGEYVLIPEQGAVHEEDQEQAPETAIEDLPAAPAIEGKPRFMHNCLYMILYYT

SEQ ID NO: 79101 - protein, 86 aa, Zea mays
  Coding DNA Sequence Number=SeqID_37322
MDLPLSLTKLDPKLLSIPQESSSSKIKPYLIKVIIHHPNCNLADGEYVLIPEQGAVHEEDQEQAPEAAIEDLPAAPSIEGKPWFYA

SEQ ID NO: 79102 - protein, 86 aa, Zea mays
  Coding DNA Sequence Number=SeqID_37323
MDLPLSLTKLDPKLLSIPQESSSSKIKPYLIKVIIHHPNCNLTDGEYVLIPEQGAVHEEDQEQAPETAIEDLPAAPAIEGKPRFYA

SEQ ID NO: 79103 - protein, 70 aa, Zea mays
  Coding DNA Sequence Number=SeqID_37324
MDLPLSLTKLDPKLQIIPQESSNCNLADGEYVLIPEQGAVHEEGQEQAPETAIEDLPAAPTIEDKPRFYA

SEQ ID NO: 79104 - protein, 135 aa, Zea mays
  Coding DNA Sequence Number=SeqID_37325
MDLPLSLTKLDPKLLSIPQESSSSKIKPYLIKLIIFPHQILIIIAYHAMHISYSLHSLDCNLADEEYVLILEQGAVHEEDQEQAPETAIEDLPAAPAIEGKPRCGGYKCGHCTAAARVSGALYAKAVRSRIWLMV

SEQ ID NO: 79105 - protein, 142 aa, Zea mays
  Coding DNA Sequence Number=SeqID_37326
MWGKANCCCLDRVQLSVLRPRRRSCRARVAAVTGLAEGANFDNVGLVGRERCQLQLVWHAGSAGSGAASDVASCRLVRAWLSVHRTGDCRAARRLGRPPFVGMALARRWPLSSVLRWWQPEKVSPPTRPSVPPAVGPPALWL

SEQ ID NO: 79106 - protein, 614 aa, Zea mays
  Coding DNA Sequence Number=SeqID_37327
MGASSSRRGRGLPCRFRRELEPAGDLAAASARLLPPLPRGFLESRHWFRSREGATLAQVAASMLDATKPKGCAHAVRLHATCMAVCPFDRCPVAFPHQWSSRMMTTSSVVGRSKPGCGLCPALSFKDLHHPCWEGGRGELGPTSAWAGDPLLPPALGGEGHPPAMRRRRPPAMWGKANCCCLDRVQLSVLRPRRRSCRARVAAVTGLAEGANFDNVGLVGRERCQLQLVWHAGSAGSGAASDVASCRLVRAWLSVHRTGDCRAARRSGIMMPPRGGRCRPVREDLSEDLPVQAGAAAVRRHGAGAQVAAVVGAEVVAAREGFSADETVGATCGRTPGSLALMACPRPLCGDMGEGLSAAASAMRSSLLLFSRPKQRSFRCWCSGRWRATWSLLSRRLSGVENLRLHCDELEPEAAVSAWTEAESARKEASLAWEHVASQTEEGVCSGRNPCGEPGREGPSAVLASSSEVEIAGSRAEVLGGQPAEATERLAGVSARAGTLAENLVVRAQGRCWRPPPRWRSFCSRRRLGPGQILPRVETTPRGPLLPLAMSDSAGVVCLDAYLFVSSRIAYPSKSYFSRKVTSEPKYQVYHLEASGPNPSGVVASQRLLIPRRL

SEQ ID NO: 79107 - protein, 256 aa, Zea mays
  Coding DNA Sequence Number=SeqID_37328
  Homolog annotation: Hit_ID=Q6QP51; Match level="QueryCoverage=63%, HitCoverage=77%, E-value=3e-11, Identity=49%"; Hit description =Putative growth-regulating factor 1
MQVACNRTAGAHPFGFVASSMEAQDHMSWTGKRDISKGILLREGSGPRALLLIRGSKAGPSEGGSKAGPSEGFDSRPRARRVRDDSGYVRYMAEARATLPRPAEASRKALRPQRSQTTPPRPQGLHPAASGATGSTASPDLGPQPQEEVSALPDPRARPPPRPRKVVSASPDPRARPQPRPRKVVSALPDPRARPQPRPREESRPRPTPASASGGFSASLDLGLGPIAPRGIHHYPTPSYLRLRGNKTGVPSRLAP

SEQ ID NO: 79108 - protein, 198 aa, Zea mays
  Coding DNA Sequence Number=SeqID_37329
  Homolog annotation: Hit_ID=Q8S1Y5; Match level="QueryCoverage=33%, HitCoverage=34%, E-value=1e-23, Identity=82%"; Hit description =Putative ubiquitin conjugating enzyme
  Pfam annotation: Domain name=UBA; Domain location=49-85; Score=33.7; E_value=6.5e-07; Accession=PF00627.21; Description=UBATS-N domain
MDASQASDGELHTSVLNHYAINYLRDYPTFAATARYWTEAFAKSASTGMEEKKLVEMGFPEDQVRSALNSVDGDENMALEKLCSGSGYPAPSVRNSRSHSEGLSLRSRGKAAALLGEQPVYHAVQRTIGCGAAMPPVALPGKDARYLGEYWRSIMAPNEAEAATCALDVAGGPPDAGGGCCLGAEAELMIVETFIPDW

SEQ ID NO: 79109 - protein, 207 aa, Zea mays
  Coding DNA Sequence Number=SeqID_37330
  Homolog annotation: Hit_ID=P42856; Match level="QueryCoverage=17%, HitCoverage=28%, E-value=8e-08, Identity=80%"; Hit description=14 kDa zinc-binding protein
MAKPSAQMPNVLAFRDINAQAPTHILIIPKVKDGLTGLSKVYDGSILLDNRSSIVSENRTPLRIRRFGVLQFCFLLSSSSWSQQLLDVGVRIIQEKESKMDASQASDGELHTSVLNHYAINVCTIVGPQYHFMEEELAGTRPQAQAEISSRPDAEDVLRKFKHPCNLCLKGKCALGPFLSILVIECKHKCLNVRICPWLNKVQITSK

SEQ ID NO: 79110 - protein, 306 aa, Zea mays
  Coding DNA Sequence Number=SeqID_37331
  Homolog annotation: Hit_ID=Q5U1Q4; Match level="QueryCoverage=17%, HitCoverage=16%, E-value=8e-13, Identity=70%"; Hit description=Class III peroxidase 39 precursor
MSASRAENGCSGVCPVNRISGVFPTKSDNSIDGVCPITGKDHGSNLKESRDHGEEKGKGPCVVPAKCPFGYDSNTSKLGLLSFTVCQTLLHESRKYSPLCGADIEFKLLFTDSLMVMPESSDHMLQGMWKQQHIASLFPHVYFASSSYPVDLTDPEYDHKSIFGRTHSVVAFLPNLKAGKKKSLLGDSKEPEDQAPHKVVIFILCHQVLAFRDINTQAPTHILIIPKVKDGLTGLSKVYDGSILLDNRSSIVSEMFATPNNNSMCGYPVVDAVKAVLEEVCLGIVSYVDILELRKGQNKERTSNQS

SEQ ID NO: 79111 - protein, 259 aa, Zea mays
  Coding DNA Sequence Number=SeqID_37332
  Gene Ontology: Mol. function=metal ion binding; Cellular component =nucleus; Biological process=response to stimulus
  Homolog annotation: Hit_ID=Q5GA20; Match level="QueryCoverage=65%, HitCoverage=57%, E-value=6e-87, Identity=92%"; Hit description =Hypothetical protein adh1D
EKNAELGLPETSLAIIPGTFPLHALTMVIVHAFFDVLKLKGLANYCVPAGEAYQKALDIAFEITQKEAYSHLPKISSKETHPKIAQVLLERQKYDMALRVLKCTGHGSFSATENFKKDGISLLSEAVIVVRVRIECRLLTETFMYHRSYCSKVKEQHSENMTHAEDTLKNSWVYHVEMMGTEFCAICIKRNLVDKMMDLPWDSEEEKHLHKSLFDSAHEMPMKPNGSLLVIYYLRDEVLTITMPRKLNNYPRKDTLYLC

SEQ ID NO: 79112 - protein, 137 aa, Zea mays
  Coding DNA Sequence Number=SeqID_37333
  Gene Ontology: Mol. function=metal ion binding; Cellular component =nucleus; Biological process=response to stimulus
  Homolog annotation: Hit_ID=Q5GA20; Match level="QueryCoverage=80%, HitCoverage=37%, E-value=4e-48, Identity=91%"; Hit description =Hypothetical protein adh1D
MGLANYCVPAGEAYQKALDIAFEITQKEAYSHLPKISSKETHPKIAQVLLERQKYDMALRVLKCTGHGSFSATENFKKDGISFLSEAVTVVRVRIECRLLTETFMYHRSYCSKVKEQHSENMTHAEDTLKKLLGLSC

SEQ ID NO: 79113 - protein, 175 aa, Zea mays
  Coding DNA Sequence Number=SeqID_37334
  Homolog annotation: Hit_ID=Q5GA20; Match level="QueryCoverage=29%, HitCoverage=17%, E-value=4e-21, Identity=96%"; Hit description =Hypothetical protein adh1D
MPFVPLFELQIEFFLRFSYVPLHLKLLNLDWKHVDDTLDPMCLKVESRKGENVELGLPETSLAIIPGTFPLHALTMVIVHAFFDVLKLKGLANYCVPAGEAYQKALDIAFEITQKEAYSHLPKISSKETHPKIAQVLLERQKYDMALLVLKCTGHGSFSATENFKKMAFHFLVRQ

SEQ ID NO: 79114 - protein, 79 aa, Zea mays
  Coding DNA Sequence Number=SeqID_37335
MPPEPSSQNPSMQIAVIRHVVSGILLHNTIYDVVPLSSKLTVLDTQLPVKQAFKIVHDEMPYCILIDGLVKGGKIQARE

SEQ ID NO: 79115 - protein, 206 aa, Zea mays
  Coding DNA Sequence Number=SeqID_37336
  Gene Ontology: Mol. function=kinase activity; Cellular component =nucleus; Biological process=fatty acid biosynthetic process
  Homolog annotation: Hit_ID=Q9FUY5; Match level="QueryCoverage=93%, HitCoverage=42%, E-value=3e-25, Identity=37%"; Hit description =Protein kinase AKINbetagamma-1
  Pfam annotation: Domain name=CBS; Domain location=34-174; Score=29.4; E_value=1.2e-05; Accession=PF00571.18; Description=CBS domain
MPPEPSSQNPSMQIAVIRHVVSGILLHNTIYDVVPLSSKLTVLDTQLPVKQAFKIMHDEGLALVPLWDDRQGTITGMLTASDFVLILRKLQRNIQVIGNEEPISAWKEAKLQFYGGPDGAAMQRRPLIHVKDSDNLVDVALTIIRNEISSVPIFKCMADSSGFFARSYKKRLRAVPFCTISFSVFLLVHGLHIRGGQVAGNSELCY

SEQ ID NO: 79116 - protein, 172 aa, Zea mays
  Coding DNA Sequence Number=SeqID_37337
  Gene Ontology: Mol. function=kinase activity; Cellular component =nucleus; Biological process=fatty acid biosynthetic process
  Homolog annotation: Hit_ID=Q9FUY5; Match level="QueryCoverage=60%, HitCoverage=21%, E-value=2e-15, Identity=42%"; Hit description =Protein kinase AKINbetagamma-1
MPLEPSSQNPSMQIAVIRHVVSGILLHNTIYDVVPLSSKLTVLDTQLPVKQAFKIMHDVGLALVPFWDDRQGTITGMLTASDFVLILRKLQRNIQVIGNEEPISAWKEAKLQFYGGPDAPLNTAKLMFFRVTGYLQIDVGSMDEHSTKSDEEYEGLAMRDVMATGPTMSSKL

SEQ ID NO: 79117 - protein, 59 aa, Zea mays
  Coding DNA Sequence Number=SeqID_37338
MTLVMLKLMKTSDEERDMLHMHEIDVGSMDEHSTKSDEEYEGLAMHDVMATGPMMSSKM

SEQ ID NO: 79118 - protein, 85 aa, Zea mays
  Coding DNA Sequence Number=SeqID_37339
MALHKLCDDGGPQLSYGSRATSARTRPLQQLSLRQAPSHLRQPRHHASKIDVGSMDEHSTKSVEEYEGLAMRDVMTTGPTMCSKL

SEQ ID NO: 79119 - protein, 194 aa, Zea mays
  Coding DNA Sequence Number=SeqID_37340
  Gene Ontology: Mol. function=transferase activity
  Homolog annotation: Hit_ID=Q6YWQ2; Match level="QueryCoverage=84%, HitCoverage=83%, E-value=2e-70, Identity=81%"; Hit description =Acidic 82 kDa protein-like
  Pfam annotation: Domain name=Fcf2; Domain location=68-161; Score =178.3; E_value=1.9e-50; Accession=PF08698.1; Description=Fcf2 pre -rRNA processing
  Subcellular localization annotation: CTP_CleavageSite=71; ConfidenceScore=5.32e-01
MPETAAPIGLSWAPKLPSFATTSGGSKSDHAPNPSAAQGSLWNRASDLVDGLFVAPRDPRQLNKLARKNVKDTAGKGWFDMPAPTITPELKKDLEILQLRHVIDPKRHFKRAGKSKALPKYFQVGTVVEPASEFYSSRLKNRERKATLVDELLSDQSLKSYSLCSVGEHGSLLLTSGAHLSSTPTAQAVGVQGG

SEQ ID NO: 79120 - protein, 192 aa, Zea mays
  Coding DNA Sequence Number=SeqID_37341
  Gene Ontology: Mol. function=nucleoside-triphosphatase activity; Cellular component=protein complex; Biological process=protein catabolic process
  Homolog annotation: Hit_ID=Q9SEI4; Match level="QueryCoverage=63%, HitCoverage=30%, E-value=3e-31, Identity=56%"; Hit description=26S protease regulatory subunit 6B homolog
  Pfam annotation: Domain name=Fcf2; Domain location=56-153; Score =74.5; E_value=3.4e-19; Accession=PF08698.1; Description=Fcf2 pre -rRNA processing
MATDMDGFDQTVIVKVVMATNRVDTLDPTSLRPGRLDRKVEFPLPDWRQKRLVFQVCTAKKNLSEEANLEDYFCRPDKICDADVELLRHIIDLKRHFKRAGKSKVVPKYFQVGTVVEPASEFYSSRLKNRERKATLVDELLSDQSLKSYRRERPTTGGTTGSCFVSAWKSEHGQISTRMALIRAGRPQCEEI

SEQ ID NO: 79121 - protein, 140 aa, Zea mays
  Coding DNA Sequence Number=SeqID_37342
  Homolog annotation: Hit_ID=Q6YWQ2; Match level="QueryCoverage=52%, HitCoverage=40%, E-value=1e-23, Identity=72%"; Hit description =Acidic 82 kDa protein-like
  Pfam annotation: Domain name=Fcf2; Domain location=2-67; Score=54.1; E_value=4.6e-13; Accession=PF08698.1; Description=Fcf2 pre-rRNA processing
MLRHIINLKRHFKRAGKSKALPKYFQVGTVVEPASEFYSSRLKNRERKATLVDELLSDQSLKRYRENSSSTVPSGERVAAAVSSGVRAVTISGASGGGALRRVIDGGAPPGSSYGDAPEGSSDDDLPQDQVTAGDTPPRI

SEQ ID NO: 79122 - protein, 55 aa, Zea mays
  Coding DNA Sequence Number=SeqID_37343
MSRTFDDYYIMNCDVISAPEVTQRRTDNNDQFVILATVTAAFVLEEAVYQQRQAQ

SEQ ID NO: 79123 - protein, 339 aa, Zea mays
  Coding DNA Sequence Number=SeqID_37344
  Homolog annotation: Hit_ID=Q65WT0; Match level="QueryCoverage=15%, HitCoverage=37%, E-value=1e-18, Identity=83%"; Hit description =Protein BUD31 homolog 2
  Pfam annotation: Domain name=G10; Domain location=89-218; Score=29.0; E_value=4.8e-09; Accession=PF01125.8; Description=G10 protein
  Pfam annotation: Domain name=PP2C; Domain location=155-339; Score= -59.5; E_value=0.017; Accession=PF00481.12; Description=Protein phosphatase 2C
  Pfam module annotation: Pfam domain module=G10::PP2C; Domain location= 89-218::155-339
MAPKSEVKCHTTVFSGWFTKPPSRCVVFKYGSGLIIVAIFVLKLASVKEKSLGLLTKNFVKLFFTMELIALDMGALIAGAKYRGEFEDRPKAILKEVIDFDGIVITSCSHAAENDPHDGKRKCEALWPIFCISHQRSHFIYGLYYRRKEISQELYEFLDPGYADFFGYCRDRRSWRHSEWHYVEEEEMVTGGGKNAVEEAPPRNDVERIHIGSENSSEDDEYRGRLVCTLQRNNRVMWVLRSQSGCTALSIVKQGDLMVVANIGDSRVVLGTASNDSVITLSSSSQESSVLAMSRTFDDYYIMDCDVISAPEVTQRKTDSNDQFVILATVTVAFVLVCL

SEQ ID NO: 79124 - protein, 354 aa, Zea mays
  Coding DNA Sequence Number=SeqID_37345
  Homolog annotation: Hit_ID=Q65WT0; Match level="QueryCoverage=17%, HitCoverage=43%, E-value=3e-21, Identity=77%"; Hit description =Protein BUD31 homolog 2
  Pfam annotation: Domain name=G10; Domain location=202-345; Score =41.3; E_value=3.9e-10; Accession=PF01125.8; Description=G10 protein
  Subcellular localization annotation: CTP_CleavageSite=64; ConfidenceScore=5.69e-01
MASPPHSVEVRTPGDSPRPTTALLSPSVAAPQPSTASRLLLLLTAVVAVATAFVLLRPPITVVTAASATAHPLSKPVVLLTPCHPRRFKVFCSPPVLLALYSLIEIRVLGIYTALQGRTGTCSTPCSTPPPSCFPTEVANSSCARSTLLSMEGRGPAVPRCGNLILGDSSDPQISCLLVKKVKRMRELKTVKTDLSFAKERYAQLEEENKMSCESYDKGDNPEANDQHKIVITPCSHAAENDPHDGKRKCEALWPIICISHQRSHFIYGLYYRRKEISQELYEFLDSGYADCKLITKWEKSHFLNAALVASVFGYCRDRRSWRHLEWHYVEEEEMVTEKSGGEDTEERSAAHSE

SEQ ID NO: 79125 - protein, 36 aa, Zea mays
  Coding DNA Sequence Number=SeqID_37346
MAHVDLQEGNERLFYKLLIDKIEESLEKILEMLKTG

SEQ ID NO: 79126 - protein, 441 aa, Zea mays
  Coding DNA Sequence Number=SeqID_37347
  Homolog annotation: Hit_ID=Q5N857; Match level="QueryCoverage=30%, HitCoverage=15%, E-value=5e-47, Identity=66%"; Hit description =Cyclin-like
MVEWHCLLLGSWNKEGVQKSEHMFQCSQCWKASLGRRNCCLWRACPWLPRWRRPTFLRLWTCSWCYPSSTARAYIYEAHVRRYFKISSYVSPSYSEHHRRVLQMTSLDACSFSCVNLELPQEHVVTALSVESYYRPDAPRRPLPRQEEDFEVDFEEFGVKAGDSELDSADEAMTFAAPGVHSPEVTTGSSQSPELSLSVTPFLAAIAVPLEDKTSTVDFVWAIPLSLLFLGDLQPPRRRCLYTMASVMLIFSAKAADIHQIIPLVKAAGPDKMSSNSEMVYGFEEDENDALAFLSAISEYDTELIETVMCHFREKFENLPEKFNGVEQLLQEFSLDDLFPLVAPLFMETPHSCSMYAEKAEQCFDEYCRCNLLFLSAHLLSTGYYKFPLQRYMALVDLQEGNERLFYKLLIDNIEEPLVRPAKSSIKLETICLVYADQFDC

SEQ ID NO: 79127 - protein, 197 aa, Zea mays
  Coding DNA Sequence Number=SeqID_37348
  Homolog annotation: Hit_ID=Q5JM42; Match level="QueryCoverage=32%, HitCoverage=41%, E-value=5e-20, Identity=75%"; Hit description =Abscisic acid-induced protein-like
MKTMITGLFLSTLSLGFFFSTDIVSAVHAVTTSGGRTPGLTDDLDQGSLHKFYWLLAAISAVDLLAFVAVARGYVYKEKAPGSPTTLDRGIHGAALAQPPLPLVLPIFNDAAYIYEAHVRRYFKISSYVSPSYSEHHCRVLQMTSLDACKSVERFINTHGPDALDRIIRAVSSFFFVVLAMRLVFLVSLTEKHLKLV

SEQ ID NO: 79128 - protein, 75 aa, Zea mays
  Coding DNA Sequence Number=SeqID_37349
METVTLGLGDGDGDGGVGLGDGAAWRAPSSETVALGLGLGDGVAGAHGSETGTGTATQYQPGGVVNPNFRSPTRR

SEQ ID NO: 79129 - protein, 75 aa, Zea mays
  Coding DNA Sequence Number=SeqID_37350
METATLGLGDGDRDGGVGLGDGAAWRAPSSETVALGLGLGDGVAGAHGSETGTGTAAQARWFQRRNPNFRSPTRR

SEQ ID NO: 79130 - protein, 68 aa, Zea mays
  Coding DNA Sequence Number=SeqID_37351
METATLGLGDGDGDGGVGLGDGAAWRAPSSETVALGLGLGDGVAGAHGSETGTGTAAQNPNFRSPTRR

SEQ ID NO: 79131 - protein, 123 aa, Zea mays
  Coding DNA Sequence Number=SeqID_37352
MGTAAHSALGLGGARARGRGRRRLASGTGTEALGLGDGDGDARRWRRRRSGSEMETATLGLGDGDGDGGVGLGDGAAWRAPSSETVALGLGLGDGVAGAHGSETGTGTAAQQPGGVVSAPGET

SEQ ID NO: 79132 - protein, 71 aa, Zea mays
  Coding DNA Sequence Number=SeqID_37353
METATLGLGDGDGDGGVGLGDGAAWRAPSSETVALGLGLGDGVAGAHGSETGMGTAAQYQPGGVVSAPGET

SEQ ID NO: 79133 - protein, 113 aa, Zea mays
  Coding DNA Sequence Number=SeqID_37354
MGDPVSGRMRDKFAPDFTQGCGEILDSSLRSLLLVFLLDSSFLGDEHAGGQKSGEGDLGLPVKFCRVRGLGKLHKLLAKLTERLARLGSDWSGMATVAEALAAMAGRKRAHRS

SEQ ID NO: 79134 - protein, 51 aa, Zea mays
  Coding DNA Sequence Number=SeqID_37355
YNLADGEYVLIPEQGTVLIPEQGTVHEEDQEQAPEAAIEDLPAAPAIGGKP

SEQ ID NO: 79135 - protein, 141 aa, Zea mays
  Coding DNA Sequence Number=SeqID_37356
MSSSSIDTVRCIALARSGHSPSICAVPVAMPSICGYVVRNASIEIYVMSKFGNTSYVRIELVHVLYEHDRSPIIIGDCNLADGEYVLILEQGTVQEEDQEQAPEAAIEDLPASPAIEGKPQFICITVLLYATLLHLMLVGL

SEQ ID NO: 79136 - protein, 108 aa, Zea mays
  Coding DNA Sequence Number=SeqID_37357
MAWWRWELGDHSEDLVGDPTQVCKRSRGIHRAGVAKDHLVSLPLGSRGIHRAGVAKDHLVVSTWFLRGPRGSDTLARVLQRGLVESADSSIPREKLEESSKPCFTFHT

SEQ ID NO: 79137 - protein, 166 aa, Zea mays
  Coding DNA Sequence Number=SeqID_37358
MGVPDFCARWRAINALQRQMLKNKRWGFWPWGHRTVRCTLPGGTQAGPGKKLPFSENPRAPVSELNFSGAPDIPPDCPTAWWRWELSDHREDLVGDPTQVCKRSRGIHRAGVAKDHLVVSTWFLRGPRGSDTLARVLQRGLVESADSSIPREKLEESSKPCFTFRT

SEQ ID NO: 79138 - protein, 123 aa, Zea mays
  Coding DNA Sequence Number=SeqID_37359
MAPGLKLSSKQEGLWKAGQGRSDGEAAAARKEGEVYIGCSVADLARPRPTEREMCPWTISNPFLTPYFFVNLKCKGERLQVVEIPRKRDIERQSKTPWYSSWSLDHLRGVDCNPRPLGRHNVE

SEQ ID NO: 79139 - protein, 269 aa, Zea mays
  Coding DNA Sequence Number=SeqID_37360
MAKLQQPLKQEPEKFSEAGTASALLDDAWNDKHYNDQHSSNCFTWNFHCIINLFPHVFRISTLRINCVHVPNKPTTVFQLQAIQNLQGVKERISYLVFPISAQQSNFSRVVPVEGYCSMYDICAQRSDGKVLNCANATKAVKLKGKCALGPFLSILVIECQHKCLNVNLYPWMDKVQIKSIGEIESEKSWLCTAKKAVRSGAPDSVRSSLTPYFFVNLKCKGERLQVVEIPRKRDIERQSKTPWYSSWSLDHLRGVDCNPRPLRRHNVE

SEQ ID NO: 79140 - protein, 768 aa, Zea mays
  Coding DNA Sequence Number=SeqID_37361
  Gene Ontology: Mol. function=protein transporter activity; Cellular component=cytoplasm; Biological process=intracellular protein transport
  Homolog annotation: Hit_ID=Q2QP84; Match level="QueryCoverage=97%, HitCoverage=90%, E-value=0.0, Identity=75%"; Hit description=Vesicle tethering family protein, putative, expressed
  Pfam annotation: Domain name=Uso1_p115_C; Domain location=640-762; Score=133.3; E_value=6.9e-37; Accession=PF04871.4; Description=Uso1 p115 like vesicle tethering protein, C terminal region
  Pfam annotation: Domain name=Uso1_p115_head; Domain location=207-536; Score=-15.5; E_value=4.3e-09; Accession=PF04869.5; Description=Uso1 p115 like vesicle tethering protein, head region
  Pfam module annotation: Pfam domain module=Uso1_p115_C::Uso1_p115 _head; Domain location=640-762::207-536
MARYLMTGGFPILLNILKEDREDVELVRGALETFVSALTPIETSQGPNTEVQPALQEAILLIPRGITVLMDMLMDREVIRNEALLLLTYLTRDAEEIQKIVVFEGVFEKIFSIIREEGYSDGGVVVQMLLKETMGFDPLISILKIRRGSAFNFTQQKTVNLLGALNTVELLLMGGPSGEAGKDANKNANQTALAQALRCIGNLVLRNPQNLDSLARKQVGEEPHVQPALNAIFSIILRTSVAQEFVAADYVFKCFCERNPNGQALLASTIVPHPNQGNMHEPAIDMPFGSVLLQALVSSDVNGDMEACCRASSVLSHIVKDNMQSKDRVLQIQLETLTPSLGRTEPVLHRIVTCLSIAASTEGENNQNNQPEEPYIQPVILRLLIIWLVDCSNAVNCLLESAVHLNYIIELASSKRYTACVRGLAAVVLGACILYNASHEKGRDAFAVADAISQKIGLTTYFLRFDELRRSLAHPLPEQHHRKELSRSSANSMSDFQEIEEDETNKDDQHPVLSEIFDSQFVNFLSKLEADIRENIMDIFSRTKTATALLPTELEQKNGEVDGEYIKRLKSFVEKQCNEMQDLLARNAMLAEELVRTGGGTTTDTSQRPNNGRERVQIEALRQELEGARRQIEALETDKSQIEAEANNQRNLAVKLESDLKSLSEAYNSIEQANYRLDAEVKTLRQGGSVPYPDVEAIKAQAKEEAEKDSEAELNDLLVCLGQEQTKVEKLSTRLAELGEDVDALLQGIGDDTAIPDDDDDDDEDSEE

SEQ ID NO: 79141 - protein, 77 aa, Zea mays
  Coding DNA Sequence Number=SeqID_37362
MSVDKQCARAERRTKLIIPSTRSLPCTPKTRRSRVSGYKKIATTANTYATEYFNREDVQKALHANVTGVPYPYSLCR

SEQ ID NO: 79142 - protein, 62 aa, Zea mays
  Coding DNA Sequence Number=SeqID_37363
MRRGLGVSLVSWKCGKNTRTQQDLEWFGSPEREASRRRDDEHSAPLGTGTLFVNRLDRRAVC

SEQ ID NO: 79143 - protein, 142 aa, Zea mays
  Coding DNA Sequence Number=SeqID_37364
MMEASEIRGIVPRTLVKREMNFRRVSQAPTSPHGGGPPHRVAGEASRRRDDELSAPLGTGRTVCQQTGQARRLLGDPDAACQRIEQDTLNTKRARHPSAWWQAARPLRNKCRGCAALWASRQAQPVGLCHGPQATRQQQVSA

SEQ ID NO: 79144 - protein, 115 aa, Zea mays
  Coding DNA Sequence Number=SeqID_37365
MAGGNELAGAKERWLAGEGECGAKRAEAASSRKTFGATKHGPNRIKVNIPDLWLKVLNAKITGFNTKTTDEAKDGGKKSFEVPSAREKVKETRNPKSGVKKKTCKVKVDLVKKSY

SEQ ID NO: 79145 - protein, 98 aa, Zea mays
  Coding DNA Sequence Number=SeqID_37366
MGDNRCSHDNSGKDKDDNPIKGITSVLSVEQVLNAKLTGFNTKTTDQAKDGGKKSFEVLSAREKVKEIKNPKPGMKKKTCKVKVDRVKKSYGASRNTT

SEQ ID NO: 79146 - protein, 145 aa, Zea mays
  Coding DNA Sequence Number=SeqID_37367
MGWNRGINPTSDTSAPGKPESSLVGFGGLDDNPIKGLTSVLSVEQVLNAKLTGFNTKTTDQAKDGGKKSFEVPSAREKVKETRNPKPGVKKKTCKVKVDRVKKSYESNIDLKQAKLGKTMKKVKESTILSSAGGQTEKLGEEQER

SEQ ID NO: 79147 - protein, 143 aa, Zea mays
  Coding DNA Sequence Number=SeqID_37368
MDIIHRFRVPNSIIMDNAESSLVGFGGLDDNPIKGLTSVLSVEQVLNAKLTGFNTKTTDQAKDGGKKSFEVPSAREKVKETRNPKPGVKKKTCKVKADRVKKSYESNIDLKQAKLGKTMKKVKESTILSSAGGETEKLGEEQE

SEQ ID NO: 79148 - protein, 112 aa, Zea mays
  Coding DNA Sequence Number=SeqID_37369
MGWNRGINPTSDTSAPGKPESSLVGFGGLDDNPIKGLTSVLSVEQVLNAKLTGFNTKTTDQAKDGGKKSFEVPSAREKVKETRNPKPGVKKKTCKVKVDRVKKSYGASRITT

SEQ ID NO: 79149 - protein, 88 aa, Zea mays
  Coding DNA Sequence Number=SeqID_37370
MRINNDDNPIKGLTSVLSVEQVLNAKLTGFNTKTTDQAKDGGKKSFEVLSAREKVKETRNPKLGVKKKTCKVKVDRVKKSYGASRITT

SEQ ID NO: 79150 - protein, 112 aa, Zea mays
  Coding DNA Sequence Number=SeqID_37371
MNYEGIIGEFLGHDLKEGDVEHPVALLEADDNPIKGLTSVLSVEQVLNAKLTGFNTKTTDQAKDGGKKSFEVPSAWEKVKETRNPKPGVKKKTCKVKVDRVKKSYGASRITT

SEQ ID NO: 79151 - protein, 99 aa, Zea mays
  Coding DNA Sequence Number=SeqID_37372
MWIKNSWRNKNGGWTKDDNPIKGLTSVLSVEQVLNAKLTGFNTKTTDQAKDGGKKSFEVPSAREKVKETRNPKPGVKKKTCKVKVDRVKKSYGASRITT

SEQ ID NO: 79152 - protein, 114 aa, Zea mays
  Coding DNA Sequence Number=SeqID_37373
MDDNMREPSRMTSKRNQVDRAEVTAVTSESSLVGFGGLDDNPIKGLTSVLSVEQVLNAKLTGFNTKTTDQAKDGGKKSFEVPSAREKVKETRNPKSGVKKKTCKVKVDRVKKSY

SEQ ID NO: 79153 - protein, 176 aa, Zea mays
  Coding DNA Sequence Number=SeqID_37374
MTSHGSSEGGKAHSHTDGLARDGFPPVRGAPGAPESSLVGFGGLDDNPIKGLTSVLSVEQVLNAKLTGFNTKTTDQAKDGGKKSFEVPSAREKVKETRNPKPGVKKKTCKVKVDRVKKSYETTDQAKDGGKKSFEVPSAREKVKETRNPKPGVKKKTCKVKVDRVKKSYGASRITT

SEQ ID NO: 79154 - protein, 46 aa, Zea mays
  Coding DNA Sequence Number=SeqID_37375
MTSTRGGGGSLIRSSGGGSQVGGGGSLIQRASDSGALVRLVTDFTQ

SEQ ID NO: 79155 - protein, 51 aa, Zea mays
  Coding DNA Sequence Number=SeqID_37376
MTSTRGGGGSLIRSSGGGSQVGGGGSLIQRASDSGALVRLVTDFYALYRIA

SEQ ID NO: 79156 - protein, 203 aa, Zea mays
  Coding DNA Sequence Number=SeqID_37377
  Subcellular localization annotation: CTP_CleavageSite=101; ConfidenceScore=5.04e-01
MTPLARRSRLMRRRRYSHVDGRRLLAGLGSAASSGPWGSRRLPAQGPRCRSPSGSGSRRHRPGNRRHYSGSRNLRHRVSRSWSCGQRLGVHRRARSGATVVVARGVANESGWSHDLCVLRPSPTLAHRLLATAFSTPPPLSRMKPPLTSRMKKPSAAVTTNKVVLDSVISLAAAKKPTRTNTYDMPVMRKVSLHRFLEKRKDR

SEQ ID NO: 79157 - protein, 87 aa, Zea mays
  Coding DNA Sequence Number=SeqID_37378
MYDKLRRSRRLDAVQSGCSALSIVKQGDLVVVANKSSASGGATARGTTLQGYYLADEPREATQRRTNNNDQFVILAIVGVAFVPTCL

SEQ ID NO: 79158 - protein, 100 aa, Zea mays
  Coding DNA Sequence Number=SeqID_37379
MVLVLPSQKEEILVVSGGSGSVPRLDSPVKTPGCGGACFVSQCGRTLGIPSGPVVLVVGEHVSHLTEEDDTKATPTVARMTNWSLLSVLLCVTSGAEMTP

SEQ ID NO: 79159 - protein, 56 aa, Zea mays
  Coding DNA Sequence Number=SeqID_37380
MSRAFDDYYIEDCGVILASEVTQRRTDNNDQFVILATVGDVRGNLSRDVRKVLSND

SEQ ID NO: 79160 - protein, 468 aa, Zea mays
  Coding DNA Sequence Number=SeqID_37381
MYREALWQKRGRPRELYPDVSSKDAPVPPELPVPNCDCGRLAWGHQRCFFFQWIDGPDKFDPRYLLFVNWLSGRTTHERFKRWVPPPPNPPPMTDAEKEVATERRMDSPPRCDCGDRAVIDKDYDKQFCCPNIDYSYGWRKCRFREWLYGPLSHWPEPEVKEKRYMGWAAEEVKFDPVLCKCGIEAKYGLVPSELGVGYFCGHMVDYDEETRKCSWESYDDKGEVMRTIESKRIMGQKMRCGSRLVDSYINDRIRDMRREAKSAFYDSPKRAEYRRLKAADEKRAQDAREWEAAQAEKQMLDNLADRLKGKIGSGVNYLADEAHARYVQDKMATVELMEEEDDDTSRLSELIALAEAGLHEEEEDDMSRLSELIALAEAGLRAQEEEDEFMSQAAAEVEAAYYKKKSDEAEAEDELFSQAADEAEANYYKRTGDKCDAGQCSKWNEVVVEDCATDDSEDELLIDCDSD

SEQ ID NO: 79161 - protein, 227 aa, Zea mays
  Coding DNA Sequence Number=SeqID_37382
  Homolog annotation: Hit_ID=Q5QNE5; Match level="QueryCoverage=22%, HitCoverage=7%, E-value=1e-16, Identity=80%"; Hit description =Tetratricopeptide repeat protein-like
MALSTESCATVPLVHEGRLRHPRKALIDLVALLVDDTVAVAAVWPPSSPSRESDAAIAARADSYALLLAARAEALFHLNLLDEADVAISSASKLNYTSSCSPDTKFCGFIANAYLFYVHAQVDMALGSGDTEIGGQKCASQDYSEGEGQIKQETTRGGCCSIGIAYAHAQIYPSLTDVFKPLIKEGNVYNVSYIQIKKANRMYKPVDNDIMICFTKWILCCLDKPAV

SEQ ID NO: 79162 - protein, 101 aa, Zea mays
  Coding DNA Sequence Number=SeqID_37383
  Homolog annotation: Hit_ID=Q6YXY3; Match level="QueryCoverage=37%, HitCoverage=3%, E-value=9e-09, Identity=73%"; Hit description =Putative splicing factor 3b, subunit 3, 130kDa
MFVATQQQETVLFYQWRHRDWRTEGRSTGLQRGGKARSSRRQQEDVINGDLCEQYPSLPADMQRKIVDQLDRTPTPAALLGEDCQGGRLEQARAALISDRA

SEQ ID NO: 79163 - protein, 108 aa, Zea mays
  Coding DNA Sequence Number=SeqID_37384
  Homolog annotation: Hit_ID=Q6YXY3; Match level="QueryCoverage=34%, HitCoverage=3%, E-value=9e-09, Identity=73%"; Hit description =Putative splicing factor 3b, subunit 3, 130kDa
MMCVHRRMFVATQQQETVLFYQWRHRDWRTEGRSTGLQRGGKARSSRRQQEDVINGDLCEQYPSLPADMQRKIVDQLDRTPTPAALLGEDCQGGRLEQARAALISDRA

SEQ ID NO: 79164 - protein, 83 aa, Zea mays
  Coding DNA Sequence Number=SeqID_37385
  Gene Ontology: Mol. function=nucleic acid binding
  Homolog annotation: Hit_ID=Q9FHC2; Match level="QueryCoverage=75%, HitCoverage=26%, E-value=3e-11, Identity=47%"; Hit description =Genomic DNA, chromosome 5, TAC clone:K24M7
GAGSAAEAAWAAASVAAQERGHSLKNCLDKSEENLKTFCYNCGESGHPLRMGYEFCKLLYLQSVRALSKNCPENKHGIYPKVS

SEQ ID NO: 79165 - protein, 206 aa, Zea mays
  Coding DNA Sequence Number=SeqID_37386
  Gene Ontology: Mol. function=nucleic acid binding; Cellular component= nucleolus; Biological process=glycerol metabolic process
  Homolog annotation: Hit_ID=Q9FHC2; Match level="QueryCoverage=87%, HitCoverage=65%, E-value=4e-51, Identity=52%"; Hit description =Genomic DNA, chromosome 5, TAC clone:K24M7
  Pfam annotation: Domain name=zf-CCHC; Domain location=119-136; Score =23.2; E_value=0.00015; Accession=PF00098.13; Description=Zinc knuckle
  Pfam annotation: Domain name=zf-CCHC; Domain location=157-174; Score =27.6; E_value=2.7e-05; Accession=PF00098.13; Description=Zinc knuckle
  Pfam annotation: Domain name=zf-CCHC; Domain location=69-86; Score =23.7; E_value=0.00012; Accession=PF00098.13; Description=Zinc knuckle
  Pfam annotation: Domain name=zf-CCHC; Domain location=94-111; Score =13.2; E_value=0.0066; Accession=PF00098.13; Description=Zinc knuckle
  Pfam module annotation: Pfam domain module=zf-CCHC::zf-CCHC::zf -CCHC::zf-CCHC; Domain location=119-136::157-174::69-86::94-111
MANKRQRDARKRFREANPDLFPPQTAPSADGTKNKSKKKKNKSMFKKANKGGTGRFKHPLRVPGMRPGERCFICKSTDHVAKACPEKALWDKKKICLLCRERGHSLKNCPDKSEGNLMKFCYNCGESGHSLSKCPKPIENGNPHALIVDIPGGTNFASCFICNQQGHLSKNCPENKHGIYPKVLHDTHAFSILMILRMGMASIMQQ

SEQ ID NO: 79166 - protein, 322 aa, Zea mays
  Coding DNA Sequence Number=SeqID_37387
  Homolog annotation: Hit_ID=Q9FHC2; Match level="QueryCoverage=13%, HitCoverage=16%, E-value=3e-10, Identity=70%"; Hit description =Genomic DNA, chromosome 5, TAC clone:K24M7
  Pfam annotation: Domain name=DUF581; Domain location=181-228; Score =22.5; E_value=3.4e-05; Accession=PF04570.5; Description=Protein of unknown function (DUF581)
  Subcellular localization annotation: CTP_CleavageSite=42; ConfidenceScore=5.28e-01
MRPISAVPTPPPPPARYPPRSLYAPASSSARIPLPAPNMEMKASAFDETLAAVLDHLKPHIVGTFLPPCCAGPQSASATGKPFTYFIGCHALFLESNYFDPIGKASDLALLSILIFILLVASTLTDLNGAFGWLAIHIDNLEVNFRCTFDGLRYGGAFNPLQCAIMLLRRMAEKLPVLLRYQSLHVHTYFKNSSEKLKEGEDIYIYQGDKSFCSTECRENFMVDEMEGRLEAPFLHGSCMQRNYWQKTNFDQILECAKEIRERGHSLKNCPNKSEGNLKKFAITVVNLDTLFPSAPSPLRMGYEFCKLLYLQSARAFEQKLP

SEQ ID NO: 79167 - protein, 864 aa, Zea mays
  Coding DNA Sequence Number=SeqID_37388
  Gene Ontology: Mol. function=helicase activity; Biological process =viral genome replication
  Homolog annotation: Hit_ID=Q1EPC6; Match level="QueryCoverage=54%, HitCoverage=28%, E-value=0.0, Identity=67%"; Hit description=DNA helicase homolog, putative
MEPTVLNRERVALDKKNRMPELFDDYSDEDFYGVQRKYSIVARVEVKFPIEPRYRDRQHYILSDINGAKIEAIANRYEIVKYFNSLLHEKHVYKMHNSVSNQLTIQQYTSNRSITTPIILNYYFYAHVFSGTVLVIDQMGHNAGRKPFTDISSNIIRGDQNELLGPMVDAKERKRKRDRERYAAMSVEQKNEKNRKRREARQQNKGHNVMPNVSGGDQNEQLRLYNQTPRRKEGKLEYIRKRRALQASTLNQGSIAMEVPTYTSEVVHPTADVSEPDSSSDNACDWVIPEYTSTPFMPASTKTEDVDSSDMSTGPLRRKHHVLPGERQAILARQNKKFEANIARNMTTLTEDTISDVGQMDDSTQPGSTIEINNTADDDDEGVIFGEDNDENEGYLFADEDTNEDFEIDGTQDQSVVTDMPDPYDKVYSNIPEETHMLKPVPDCGYCTAKKFEYEPPGFCCRGGKVELAPLETPPQLRRLWDSADSDAKHFRDNIRFFNGHFSFTSLYCCLDSMTTNMRDSGIYTFRAQGMMYHNIKSFGSECGAEHKHLELYFYDDDPSLEHRYRKCREDQIQKDQEVIKQIVGILRGNPYSEHLRSMGHVENLADYHIALNLDQTLNQKTYNTPLTSEVAAVWIEGSERRGQFSKSVMLHGKDRSSHGIRSYHGCYDALSYPLFFPRGELGWHANIPKVGVSMDEVDAYRATHRASNANDEDAEPPTHLCVSVRDYYCYKFQIRPGVFNPILHGKRLFQQFAVDTYIKIESSRLDFIRKNQDRLRADLYQGLVDSMLDGDVRGEKVGKRTVLSPSFIGGPRDMRRRYMDAMALVRKFGKPDIFLTMTCNPNWDEIRRELLPGQTPQDRPDLV

SEQ ID NO: 79168 - protein, 597 aa, Zea mays
  Coding DNA Sequence Number=SeqID_37389
  Gene Ontology: Mol. function=helicase activity; Biological process =proteolysis
  Homolog annotation: Hit_ID=Q1EPC6; Match level="QueryCoverage=76%, HitCoverage=27%, E-value=0.0, Identity=67%"; Hit description=DNA helicase homolog, putative
MEVPTYTSEVVHPTADVSEPDSSSDNTCDWVIPEYTSTPFMPASTKTEDVDSSDMSTGPLRRKHHVLPGERQAILARQNKKFEANIARNMTTLTEDTISDVGQMDDSTQPGSTIEINNTADDDDEGVIFGEDNDENEGYLFADEDTNEDFEIDGTQDQSVVTDMPDPYDKVYSNIPEETHMLKPVPDCGYCTAKKFEYEPPGFCCRGGKVELAPLETPPQLRRLWDSADSDAKHFRDNIRFFNGHFSFTSLYCCLDSMTTNMRDSGIYTFRAQGMMYHNIKSFGSECGAEHKHLELYFYDDDPSLEHRYRKCREDQIQKDQEVIKQIVGILRGNPYSEHLRSMGHVENLADYHIALNLDQTLNQKTYNTPLTSEVAAVWIEGSERRGQFSKSVMLHGKDRSSHGIRSYHGCYDALSYPLFFPRGELGWHANIPKVGVSMDEVDAYRATHRASNANDEDAEPPTHLCVSVRDYYCYKFQIRPGVFNPILHGKRLFQQFAVDTYIKIESSRLDFIRKNQDRLRADLYQGLVDSMLDGDVRGEKVGKRTVLSPSFIGGPRDMRRRYMDAMALVRKFGKPDIFLTMTCNPNWDEIRRELKL

SEQ ID NO: 79169 - protein, 2436 aa, Zea mays
  Coding DNA Sequence Number=SeqID_37390
  Gene Ontology: Mol. function=helicase activity; Biological process =viral genome replication
  Homolog annotation: Hit_ID=Q1EPC6; Match level="QueryCoverage=58%, HitCoverage=88%, E-value=0.0, Identity=70%"; Hit description=DNA helicase homolog, putative
  Pfam annotation: Domain name=DUF889; Domain location=1558-1794; Score= 440.3; E_value=2.6e-129; Accession=PF05970.5; Description=Eukaryotic protein of unknown function (DUF889)
  Pfam annotation: Domain name=Peptidase_C48; Domain location=1913 -2134; Score=50.7; E_value=5e-12; Accession=PF02902.9; Description =Ulp1 protease family, C-terminal catalytic domain
  Pfam module annotation: Pfam domain module=DUF889::Peptidase_C48; Domain location=1558-1794::1913-2134
MEPTVLNRERVALDKKNRMPELFDDYSDEDFYGVQRKYSIVARVEVKFPIEPRYRDRQHYILSDINGAKIEAIANRYEIVKYFNSLLHEKHVYKMHNVWFGLNPGAFNFRHLNGTMELYFTHQTVVEPYAVPVQMPPFPKHIFLNLDDIAELPNRTLVENKSVSNQLTIQQYTSNRSITTPIILNYYFYAHVFSGTVLVIDQMGHNAGRKPFTDISSNIIRGDQNELLGPMVDAKERKRKRDRERYAAMSVEQKNEKNRKRREARQQNKGHNVMPNVSGGDQNEQLRLYNQTPRRKEGKLEYIRKRRALQASTLNQGSIAMEVPTYTSEVVHPTTDVSEPDSSSDNACDWVIPEYTSTPFMPASTKTEDVDSPDMSTGPLRRKHHVLPGERQAILARQNKKFEANIARNMTTLTEDTISDVGQMDDSTQPGSTIEINNTVDDDDEGVIFGEDNDENEGYLFADEDTNEDFEIDGTQDQSVVTDMPDPYDKVYSNIPEETHMLKPVPDCGYCTAKKFEYEPPGFCCRGGKVELAPLETPPQLRRLWDSADSDAKHFRDNIRFFNGHFSFTSLYCCLDSMTTNMRDSGIYTFRAQGMMYHNIKSFGSECGAEHKHLELYFYDDDPSLEHRYRKCREDQIQKDQEVIKQIVGILRGNPYSEHLRSMGHVENLADYHIALNLDQTLNQKTYNTPLTSEVAAVWIEGSERRGQFSKSVMLHGKDRSSHGIRSYHGCYDALSYPLFFPRGELGWHANIPKVGVSMDEVDAYRATHRASNANDEDAEPPTHLCVSVRDYYCYKFQIRPGVFNPILHGKRLFQQFAVDTYIKIESSRLDFIRKNQDRLRADLYQGLVDSMLDGDVRGEKVGKRTVLSPSFIGGPRDMRRRYMDAMALVRKFGKPDIFLTMTCNPNWDEIRRELLPGQTPQDRPDLVVRVFHAKLQELKHRLTKQDILGKVRAYVYVVEFQKRGLPHAHFLLIMQRKYKLTCPEQYDLLISAEIPSNKYPELRKMVIKHMMHGPCGSLNPNCPCTKGRASCKNQYPRHFCEATMQGKDSYPNYRRRDDGRKANVRGCELDNRWVVPYNPYLLRLFNCHINVEACGSIKAVKYLFKYIYKGHDRASVVMRDASKENDDVDEIQQYRDARWVTPPEALWRIYGFELSQNSPSVMQLQLHLPNMHMVTFHERQMVERVVNRPGADRSMITAYFEVNKLYEEARGILYRDFPEWYTWKQGKVWQRRKRNTGGQVGRIVSALPSEGERFYLRLLLNHVTGATSYVDLRTVDGDTLPSFREAAQRRGLLEADNTIDECLNEAALYQMPSALRRLFATILVYCEPNDVAELWQRHLDTMSEDYHHITQSKTHLQQMVLIDIRNMLQSMGKDIKTFPLPAIIDRYDDSQGIDREIYEEESIEATTEDVALHETLNEEQKSAYEKILSVVDTSNGGMFFVDGPGGTGKTYLYKALLAVLRSQGKIAVATATSGVAASIMPGGRTAHSRFKIPLTIDDGAICTFTKQSGTSKLLQKASLIIWDEASMAKRQSIEALDNSMRDIMGRPGLPFGGKTIVFGGDFRQVLPVVRKGSRAQIVAASLRSSYLWESMCHLKLVRNMRAKSDPWFAEYLLRVGGGTEEVNNDGDVRLPDEVCVSYTGDDHDLDRLIDDIYPSLNENMSNTSYITSRAILTTRNDWVDMINMRMIDRFQREQMMYHSFDTAMDDPNNYYPSEFLNTLSPNGLPPHVLKLKIGCPIMLLRNIDPANGLCNGTRLVVRGFQKNSIDAEIVLGQHAGMRVFLPRIPLCPSDDEMFPFHFKRKQFPVRLSFAMTVNKSQGQTIPNVAVYLPEPVFSHGQLYVALSRATTRLNVKVLVIPVTDDKMKKGVQKKSTINGVTYTKNIVYKEGDLALIDWIKEIPCEPRVEVVLIDDAFVERKWMECLFQPDAYLGDEVIDCYINLIKAQEHLKCRSGGRVHIENAFQFNFLKRDGDVETKTDELYPSKDMAQISSAERRVLLYLDHDMVFIPINIREMHWYLAVINARNMEIQVLDSLGTSSGRNDLIATIKGLQRQIDMVSQRKELTDHRWPDLRVASWPLKEIEMEYAKQTDSSSCGLFLLNYIEYWTGDELSDNFTQDDMSHFRKKLAAILLSSDINKRKGCPLYKYDKEVDAGCSSDVQILDSPTNPKKEENYLVYLKKTKMTWVRSFNPFKIEISVKDLQNVLRVNLDMTLKCFDMAVRLLAIKESHMSKDEMIKDKKHYMDMRFWRMVGFGKLAKYHQDPTTEELAKTLDCWPSLNYYITGCKYVLMPWKFNGCYALFIIDHGKKHVTFMDFTPTEDWCKHMPYKRFAEAIIMASKKYKIAYNKKRSGWAHDIFKWEHTIRSGLPLDLKGVNTSYFVLQAMVMWGSGRRMEFNRDTKILRRNFVIDLLSYEENSCRYAIPPNIQQRLISIAKKD

SEQ ID NO: 79170 - protein, 71 aa, Zea mays
  Coding DNA Sequence Number=SeqID_37391
MCWSRLLIKWLDDDGEGTSCYGQMEMEMNAQGKGCRLLDGLVVVPRELFNEDCEEAAVVIVRGVVLASPER

SEQ ID NO: 79171 - protein, 37 aa, Zea mays
  Coding DNA Sequence Number=SeqID_37392
CHLLDGLVVVPHELFNGDCEEVAVVIVRGVVLASPER

SEQ ID NO: 79172 - protein, 46 aa, Zea mays
  Coding DNA Sequence Number=SeqID_37393
MEMNAQDKGCHLLDGLVVVPHELFNGDCEEVAVVIVRGVVLASPER

SEQ ID NO: 79173 - protein, 126 aa, Zea mays
  Coding DNA Sequence Number=SeqID_37394
MGFAPIPTVTEPPKVLGLPIVVLVQGTLDNPIDAHNHLTSSTREAKHPPAQKFIDFKVGGKRPPVTTFTAGALPWVPPLNRNSRTPLLPLLQQHGFENPEYEVYFRKSYPTKEKDSQGYAGLRESR

SEQ ID NO: 79174 - protein, 57 aa, Zea mays
  Coding DNA Sequence Number=SeqID_37395
MGSKTLSTKCTFASLTRLRKKTLKDMLAFGNQDFQVVDFRIVLRDLPELPVLDTCWE

SEQ ID NO: 79175 - protein, 132 aa, Zea mays
  Coding DNA Sequence Number=SeqID_37396
MGSKTLSTKCTFASLTRLKEKDSQGYAGFWESSSMSHPVLEGNPNANHHHLLSTEYNGGNLGWGWCVKQGGCTLYPQVMIPFRPGLYRPDLHYQGEWPGIHYVAFTKTPLVHSCSLDFASRTNAVHLPKVGD

SEQ ID NO: 79176 - protein, 268 aa, Zea mays
  Coding DNA Sequence Number=SeqID_37397
  Homolog annotation: Hit_ID=Q7XDY8; Match level="QueryCoverage=14%, HitCoverage=15%, E-value=1e-15, Identity=92%"; Hit description =Expressed protein
  Pfam annotation: Domain name=WRC; Domain location=188-232; Score =73.8; E_value=5.3e-19; Accession=PF08879.1; Description=WRC
MSAPIATQVQGYRYTQQYNGRRLGGAESGNLPCMSEIKRGKTSETRGDLATTEREGKKGAATGQRDNPTNAISGAGKGRRVGERRGHEDPEAHPCQGSVAGTAASASSSSPTAAASHGEMPELIIDFTCVASREKPRDEAAAEEEEEKRAVLAAGVREGDDRVRPAAAAAGSGNSSATDDVPRPEPQEQDAARCSRNDGKRWRCKKAAVPGYLFCDRHIAWSTRKRKPRASTKPKVHGSGVLEPTAIAQEFAEDHGPTQRDAGFLGGF

SEQ ID NO: 79177 - protein, 267 aa, Zea mays
  Coding DNA Sequence Number=SeqID_37398
  Homolog annotation: Hit_ID=Q8H8U0; Match level="QueryCoverage=30%, HitCoverage=25%, E-value=2e-34, Identity=89%"; Hit description =Putative phosphatidylglycerolphosphate synthase
  Pfam annotation: Domain name=CDP-OH_P_transf; Domain location=109 -259; Score=78.1; E_value=2.8e-20; Accession=PF01066.11; Description =CDP-alcohol phosphatidyltransferase
  Subcellular localization annotation: CTP_CleavageSite=26; ConfidenceScore=5.25e-01
MGGKRSVDPPTLSSPQPLQPSPHPVVSPAPKTEGKRGRGGGGKGGGPGDAALAGVRFWILMAPCLHAPGSDSRGGKACKNKKRNKIRKDQAKNPTKAYSGPVNKLWPKTGIFLAAAVTDWLDGYIARKMQLGTPFGAFLDPVADKLMVAATLVLLCTKPLESSLLNDGPWLLTVPSIAIIGREALPSSGKEAIELLDILLRWIVLRFCESNTTCLLKVLDFLLELFDILKDQSYMLTEAEAAIYLPCLIMKSRFVARNQKITLMVMR

SEQ ID NO: 79178 - protein, 162 aa, Zea mays
  Coding DNA Sequence Number=SeqID_37399
  Gene Ontology: Mol. function=CDP-diacylglycerol-glycerol-3-phosphate 3-phosphatidyltransferase activity; Cellular component=integral to membrane; Biological process=phospholipid biosynthetic
  Homolog annotation: Hit_ID=Q8H8U0; Match level="QueryCoverage=52%, HitCoverage=25%, E-value=3e-35, Identity=88%"; Hit description =Putative phosphatidylglycerolphosphate synthase
  Pfam annotation: Domain name=CDP-OH_P_transf; Domain location=4-154; Score=78.1; E_value=2.8e-20; Accession=PF01066.11; Description=CDP -alcohol phosphatidyltransferase
MAKTGIFLAAAVTDWLDGYIARKMQLGTPFGAFLDPVADKLMVAATLVLLCTKPLESSLLNDGPWLLTVPSIAIIGREALPSSGKEAIELLDILLRWIVLRFCESNTTCLLKVLDFLLELFDILKDQSYMLTEAEAAIYLPCLIMKSRFVARNQKITLMVMR

SEQ ID NO: 79179 - protein, 174 aa, Zea mays
  Coding DNA Sequence Number=SeqID_37400
  Homolog annotation: Hit_ID=Q337S2; Match level="QueryCoverage=84%, HitCoverage=84%, E-value=2e-26, Identity=39%"; Hit description =Expressed protein
  Pfam annotation: Domain name=HR_lesion; Domain location=1-161; Score =167.4; E_value=3.7e-47; Accession=PF05514.2; Description=HR-like lesion-inducing
MGFVSFVGRVLFVAAFLLSAYQDDISINCGGLEVYRSCNTIFIDSRFNEFGADGGPAAKALRPKFNVFVKNVSAHLGVAVPHIELKHVIAATIGLKGLGSLLFILSSSLGAYLLLLYLALITPIIHDFYNYDMEKAEFAGLFAKFTQAITDFSVQKCSTQRTFCRSIQITQNNL

SEQ ID NO: 79180 - protein, 199 aa, Zea mays
  Coding DNA Sequence Number=SeqID_37401
  Homolog annotation: Hit_ID=Q337S2; Match level="QueryCoverage=47%, HitCoverage=44%, E-value=7e-13, Identity=42%"; Hit description =Expressed protein
  Pfam annotation: Domain name=HR_lesion; Domain location=1-102; Score =87.0; E_value=5.7e-23; Accession=PF05514.2; Description=HR-like lesion-inducing
MPAGPLALEPLAFSTHLGVAVPHIELKHVVAATIGLKGLGSLLFILSSSLGAYLLLLYLALITPIIHDFYNYDMEKTEFAGLFAKFTQDLALIGALLFFLGMKNSIPKSISKQAQRDAANAIELRFYMFIIRFHFAGHDPNKGNWRLVKPQTGATKVEEIHSKNHPVSLLIIEYSPFLAVVESKDRRISVALAFAGHQE

SEQ ID NO: 79181 - protein, 358 aa, Zea mays
  Coding DNA Sequence Number=SeqID_37402
  Homolog annotation: Hit_ID=Q7XI44; Match level="QueryCoverage=39%, HitCoverage=15%, E-value=2e-32, Identity=50%"; Hit description =Putative anther ethylene-upregulated protein ER1
MEVVESKDRRISVALAFAGHQEGDVVVSSLTKLSTCLITISLHGMAFNFQIIQFMHSSIWNNLKSPNVNRDRYNDGSTKHSLLKQSSLDLLTIETPGLKKNDSFSRWMNKELEEVVDLGIKSTSDAFWSNIETVKVPDGSNVLTNEQLDAYVVNPSLSQDQLFSILDVSPSCAYIGTNTKVCAKFSQGNLCKRFVTGAGIAEADSCASASTGAHIPTFESVPESSVLTVDDRTPEDKERWWRRGLRAISEGKLAIVLLAGGQLLCSLHSQFSWVSMILSNAPKYFVEARTAARAPTRPRATALLALDAVRDLPPSPGLSLYLRTIRGCISNHGLYYKFSVKKVHSTCFYKEKSMFNSQ

SEQ ID NO: 79182 - protein, 207 aa, Zea mays
  Coding DNA Sequence Number=SeqID_37403
  Gene Ontology: Mol. function=DNA binding; Cellular component=nucleus
  Homolog annotation: Hit_ID=Q75LH6; Match level="QueryCoverage=99%, HitCoverage=21%, E-value=6e-54, Identity=53%"; Hit description =Putative SBP-domain protein
  Pfam annotation: Domain name=SBP; Domain location=154-207; Score =59.7; E_value=9.9e-15; Accession=PF03110.5; Description=SBP domain
MEAARFGARSSHLYGSGLGELDLNRRESRVFGWDLNEWSWDSQRFTATPVPVEAANGSGLNSSPSSSEEAGEEMAKNGGLGGDTDKRKRAVVIDDDDDDETEDQDTVVNGGGSLSLIIGGSAAGAGAMENGDVNEDERNGKKIRVQGGGSSGPACQVEGCGADLTAAKDYHRRHKVCEMHAKATTAVVGNTVQRFCQQCSSYLFIEE

SEQ ID NO: 79183 - protein, 444 aa, Zea mays
  Coding DNA Sequence Number=SeqID_37404
  Gene Ontology: Mol. function=DNA binding; Cellular component=nucleus; Biological process=regulation of transcription, DNA-dependent
  Homolog annotation: Hit_ID=Q75LH6; Match level="QueryCoverage=90%, HitCoverage=41%, E-value=1e-147, Identity=64%"; Hit description =Putative SBP-domain protein
  Pfam annotation: Domain name=SBP; Domain location=154-232; Score =180.5; E_value=4.2e-51; Accession=PF03110.5; Description=SBP domain
MEAARFGARSSHLYGSGLGELDLNRRESRVFGWDLNEWSWDSQRFTATPVPVEAANGSGLNSSPSSSEEAGEEMAKNGGLGGDTDKRKRAVVIDDDDDDETEDQDTVVNGGGSLSLIIGGSAAGAGAMENGDVNEDERNGKKIRVQGGGSSGPACQVEGCGADLTAAKDYHRRHKVCEMHAKATTAVVGNTVQRFCQQCSRFHLLQEFDEGKRSCRRRLAGHNKRRRKTRPDTASCGTASIEDKISNYLLLSLIGICANLNSDNVQHSNGQELLSTLLKNLGSVAKSLEPKELCKLLEAYQSLQNGSNAGTSGTANATEEAAGPSNSKLPFVNGSHCGHASSSVVPVQSKATIVVTPEPASCKLKDFDLNDTCNDMEGFEDGQEGSPTPAFKTADSPNCASWMQQDSTQSPPQTSGNSDSTSTQSLSSSNGDAQGFNNSYESYL

SEQ ID NO: 79184 - protein, 972 aa, Zea mays
  Coding DNA Sequence Number=SeqID_37405
  Gene Ontology: Mol. function=DNA binding; Cellular component=nucleus; Biological process=regulation of transcription, DNA-dependent
  Homolog annotation: Hit_ID=Q75LH6; Match level="QueryCoverage=99%, HitCoverage=100%, E-value=0.0, Identity=67%"; Hit description =Putative SBP-domain protein
  Pfam annotation: Domain name=Ank; Domain location=754-786; Score =13.6; E_value=0.34; Accession=PF00023.20; Description=Ankyrin repeat
  Pfam annotation: Domain name=Ank; Domain location=800-839; Score=5.2; E_value=5.6; Accession=PF00023.20; Description=Ankyrin repeat
  Pfam annotation: Domain name=SBP; Domain location=154-232; Score =180.5; E_value=4.2e-51; Accession=PF03110.5; Description=SBP domain
  Pfam module annotation: Pfam domain module=Ank::Ank::SBP; Domain location=754-786::800-839::154-232
MEAARFGARSSHLYGSGLGELDLNRRESRVFGWDLNEWSWDSQRFTATPVPVEAANGSGLNSSPSSSEEAGEEMAKNGGLGGDTDKRKRAVVIDDDDDDETEDQDTVVNGGGSLSLIIGGSAAGAGAMENGDVNEDERNGKKIRVQGGGSSGPACQVEGCGADLTAAKDYHRRHKVCEMHAKATTAVVGNTVQRFCQQCSRFHLLQEFDEGKRSCRRRLAGHNKRRRKTRPDTASCGTASIEDKISNYLLLSLIGICANLNSDNVQHSNGQELLSTLLKNLGSVAKSLEPKELCKLLEAYQSLQNGSNAGTSGTANATEEAAGPSNSKLPFVNGSHCGHASSSVVPVQSKATIVVTPEPASCKLKDFDLNDTCNDMEGFEDGQEGSPTPAFKTADSPNCASWMQQDSTQSPPQTSGNSDSTSTQSLSSSNGDAQCRTDKIVFKLFDKVPSDLPPVLRSQILGWLSSSPTDIESHIRPGCIILTIYLRLVESAWQELSENMSLHLDKLLSSSTDNFWASGLVFVMVRRRLAFMLNGQIMLDRPLAPSSHHYCKILCVKPVAAPYSATINFRVEGSNLLSTSSRLICSFEGRCIFQEDTDSVAENDEYEDRAIECLSFCCSVPGPRGRGFIEVEDSGFSNGFFPFIIAEKDICFEVSELESIFESSSIEHADANDNAREQALEFLNELGWLLHRANRMSKENVTDTSVATFSMWRFRNLGVFAMEREWCAVIKMLLDFLFIGLVDVGSRSPEEVVLSENLLHAAVRRKSVNMVRFLLRYRPNKNSKGTAQTYLFRPDALGPSMITPLHIAAATSDAEDVLDVLTDDPGLIGISAWSNARDGTGFTPEDYARQRGNDAYLNLVQKKIDKHLGKGRVVLGVPSSICSVITDGVKPGDVSLEICMPMSASVPGCLLCSRKARVYPNSTSRTFLYRPAMLTVMGVAVVCVCVGILLHTFPRVYAAPTFRWELLERGPM

SEQ ID NO: 79185 - protein, 223 aa, Zea mays
  Coding DNA Sequence Number=SeqID_37406
  Homolog annotation: Hit_ID=Q1SFH7; Match level="QueryCoverage=33%, HitCoverage=14%, E-value=4e-17, Identity=47%"; Hit description =Tetratricopeptide-like helical
MEALYFVKSMPVEPHPGLWGALASACKMHGKVELGEEVAKKLIELEPRHGSRYILLSNLYGSVNRWDDMASVRKILKRSKGGADSLKEAAVPAPRLISSQELERPTVALHQERATVALHRELARLDARSVARLPAGAGLGGSGTAEEAEMAAALMDVAAASAAASAAVFSAVAYVSAAASSCSNKKAPTAFVAAAFAKKPETPTTADVAQEKHEELERLYSFS

SEQ ID NO: 79186 - protein, 123 aa, Zea mays
  Coding DNA Sequence Number=SeqID_37407
MVALHRELARLAARSVARLPAGAGLGRSGTAEEAEMAAALMDVAAASAAASAAVFSAVASVSAAASSCSNKKAPTTFVAAAFAKKPETPTTADVAQEKHEELERCIDECESGSEVVFRSIVRK

SEQ ID NO: 79187 - protein, 135 aa, Zea mays
  Coding DNA Sequence Number=SeqID_37408
MVALHRELARLAARSVARLPAGAGLGGSGTAEEAEMAAALMDVAAASAAASVAVFSVVASVSAAASSCSNKKALTAFVAAAFAKKPETPTTADVAQEKHEELERCIDECESGSEVVFRSIVRNRVSLLNIHSPAI

SEQ ID NO: 79188 - protein, 216 aa, Zea mays
  Coding DNA Sequence Number=SeqID_37409
MGRQVEQAGEVGHGRGCGALGREAGRGAGVARWAAGAECEMGCGREKEGDGCLRPINAILEDLLDLWVRTHTRFRCVTLILLADIDHIVFIGELEIAKWTSVRGKNSEKRRIGNEQERGEIWDKHQGKDQGMTRLRRRQTNTQPRMYSKQDLQGVKEGGAVNDEIDEALSPNRDGNEEASKGRFNRTQTREYKKAEDNDLTAEQGGISEDQKFMDI

SEQ ID NO: 79189 - protein, 120 aa, Zea mays
  Coding DNA Sequence Number=SeqID_37410
MGVKEGGAVNDEIDEALSPNRDGNDEASKGRFKGMVIENKNISKDGIGTEPVRRQGVKRNQGREIGKVKATLNRGTTKDGVEKSHATKKRIRPREEYVKYNTSIEMEKEMLKGRYKINIK

SEQ ID NO: 79190 - protein, 57 aa, Zea mays
  Coding DNA Sequence Number=SeqID_37411
MGEAALKYGYMIRIKDLQGVKGGGVVNDEIDEALSPNRDGNEEASKGRFNVSRKARE

SEQ ID NO: 79191 - protein, 109 aa, Zea mays
  Coding DNA Sequence Number=SeqID_37412
MEERSSAAGLLAGHGEACWRPWSKEQGRSRPRESRGIGVLPGSSCSCGKNRGRRSAEHWAEGALRPWEAAGDLGDPALAAVAAVGREEERGRLEKREREWRLKQLEGWE

SEQ ID NO: 79192 - protein, 190 aa, Zea mays
  Coding DNA Sequence Number=SeqID_37413
  Subcellular localization annotation: CTP_CleavageSite=52; ConfidenceScore=5.36e-01
MGGAPAGNPTHAAKAATKGKGLGTQGAGDVAQGARDSSPEQGVGHGRRRLTSSSSNQRSALRHGWSRRARVGPWQVELGQGEKGCPRPWRRGARLLGCSSAMEQRAGKVAAKGEQGRRRAPRELLLLRQEQREEERRALGRGSPAAMGGCWRPWRSCAGCCCRRGQGGRKGSAGEERKGVAAETIRGSFG

SEQ ID NO: 79193 - protein, 55 aa, Zea mays
  Coding DNA Sequence Number=SeqID_37414
MAQGTSLVRARAGELPSPMANALLRLEWVKNINYATCYWCLKTKCAKNQFGVSPV

SEQ ID NO: 79194 - protein, 134 aa, Zea mays
  Coding DNA Sequence Number=SeqID_37415
MGDLWTNIRADLAKMQATLQKVEQGLLQIKAAVQHEQHQLALSARLRTSAVVGIQAAACGFLARRRVREMRRQMLEAALVTVDLGTRGRDLALSDDHQQWHQAAISKCEHDGVHGIQVAAHVQVQCAQGVRLMG

SEQ ID NO: 79195 - protein, 221 aa, Zea mays
  Coding DNA Sequence Number=SeqID_37416
  Subcellular localization annotation: CTP_CleavageSite=64; ConfidenceScore=5.13e-01
MGSIACQFCYHILDAGVPIPGITPNFITSSSLTASPSPWATPLGATTAQQSPDPSMGDLWTNIRADLAKMQATLQKVEQGLLQIKAAVQHEQHQLALSARLRTSAVVGIQAAACGFLARRRVREMRRQMLEAALVTVDLGTRGRDLALSDDHQQWHQAAISKCEHDGVHGIQVAAHVQVQCAQGVRLMGGPRPVFLPIDTPLQSLTDLATITVYNSRALQA

SEQ ID NO: 79196 - protein, 113 aa, Zea mays
  Coding DNA Sequence Number=SeqID_37417
MPRMRRPTVVHWLRGSPIQRAQDPAIGSGRGIEEGEGPHRALWCQRTPSVGDFVARTTRSSRTFTYMRRRIGAAQGEAEGLLRGRGDSVIIAQQKCGAVEKESRFCWRFWALQ

SEQ ID NO: 79197 - protein, 108 aa, Zea mays
  Coding DNA Sequence Number=SeqID_37418
MSRMRRPTVVHWLRGSPIQRAQDPAIGSGRGIEEGEGPHRALWCQRTPSVGDFVARTTRSSRTFTYMRRRIGATQGEAEGLLRGRGDSVIIVQQKCGAVEKESRFCWR

SEQ ID NO: 79198 - protein, 93 aa, Zea mays
  Coding DNA Sequence Number=SeqID_37419
  Gene Ontology: Mol. function=hydrolase activity; Cellular component =chloroplast
  Homolog annotation: Hit_ID=Q10Q09; Match level="QueryCoverage=82%, HitCoverage=15%, E-value=2e-30, Identity=88%"; Hit description =Diphosphonucleotide phosphatase 1, putative, expressed
MGHTTPHYSHLNGLRLMVQMSPMTLSLVHLTQQTSSYANGYLSQCDQFTAQVEPIASTVPYMVGSGSHKRDWPGSGSFYGNLDSGGECGRANR

SEQ ID NO: 79199 - protein, 142 aa, Zea mays
  Coding DNA Sequence Number=SeqID_37420
  Gene Ontology: Mol. function=hydrolase activity; Cellular component =chloroplast
  Homolog annotation: Hit_ID=Q10Q09; Match level="QueryCoverage=98%, HitCoverage=30%, E-value=1e-65, Identity=76%"; Hit description =Diphosphonucleotide phosphatase 1, putative, expressed
MVQMSPMTLSLVHLTQQTSSYANGYLSQCDQFTAQVEPIASTVPYMVGSGSHKRDWPGSGSFYGNLDSGGECGVPAQNMFYVPAENREQFWYSTDYGMFRFCKQPWLIFLAHRVLGYSSATFYADEGTTEEPMGHECLQPLW

SEQ ID NO: 79200 - protein, 187 aa, Zea mays
  Coding DNA Sequence Number=SeqID_37421
  Gene Ontology: Mol. function=hydrolase activity; Cellular component =chloroplast
  Homolog annotation: Hit_ID=Q10Q09; Match level="QueryCoverage=92%, HitCoverage=32%, E-value=2e-65, Identity=68%"; Hit description =Diphosphonucleotide phosphatase 1, putative, expressed
MGHTTPHYSHLNGLRLMVQMSPMTLSLVHLTQQTSSYANGYLSQCDQFTAQVEPIASTVPYMVGSGSHKRDWPGSGSFYGNLDSGGECGVPAQNMFYVPAENREQFWYSTDYGMFRFCVSQYRVGLEARNRAVQKQPWLIFLAHRVLGYSSATFYADEGTTEEPMGPRVPSATLVEVQGRYRYVRFQ

SEQ ID NO: 79201 - protein, 174 aa, Zea mays
  Coding DNA Sequence Number=SeqID_37422
  Gene Ontology: Mol. function=hydrolase activity; Cellular component =chloroplast
  Homolog annotation: Hit_ID=Q10Q09; Match level="QueryCoverage=92%, HitCoverage=31%, E-value=2e-69, Identity=77%"; Hit description =Diphosphonucleotide phosphatase 1, putative, expressed
MGHTTPHYSHLNGLRLMVQMSPMTLSLVHLTQQTSSYANGYLSQCDQFTAQVEPIASTVPYMVGSGSHKRDWPGSGSFYGNLDSGGECGVPAQNMFYVPAENREQFWYSTDYGMFRFCVSQYRVGLEARNGAVQKQPWLIFLAHRVLGYSSATFYTDEGTTEEPMGHECLQPLW

SEQ ID NO: 79202 - protein, 174 aa, Zea mays
  Coding DNA Sequence Number=SeqID_37423
  Gene Ontology: Mol. function=hydrolase activity; Cellular component =chloroplast
  Homolog annotation: Hit_ID=Q10Q09; Match level="QueryCoverage=92%, HitCoverage=31%, E-value=3e-68, Identity=77%"; Hit description =Diphosphonucleotide phosphatase 1, putative, expressed
MGHTTPHYSHLNGLRLMVQMSPMTLSLVHLTQQTSSYANGYLSQCDQFTAQVEPIASTVLYMVGSGSHKRDWPGSGSFYGNLDSGGECGVPAQNMFYVPAENREQFWYSTDYGMFRFCVSQYRVGLEARNGAVQKQPWLIFLAHRVLGYSSATFYTDEGTTEEPMGHECLQPLW

SEQ ID NO: 79203 - protein, 374 aa, Zea mays
  Coding DNA Sequence Number=SeqID_37424
MQARGMRVAGARVRAGTRPRAGDQGAGPGTAAGERGEGAAAGARPGSRGLRRGRTGRGRATGAGRRRARGQGRARRGRGLAGAGSRVRPRGGAGRGSPGVRGGRRGHGSPGQGGRGKGAGPGLGPGARPGAGRVGRGAAARACQGASYTTPPQYAVQVFEEHRVPRCRVRMTLEPHPLQPGWRSLDSESFRYQAEDTIEAITLHGLTTFCGFHPLELSTHHIGLFPAEKEDDPMWKDRVEHAKDIWALYPGQTTHLTVRCMNALYRLQAVRGEAMSQLMALLEATKVTLDNREKLMVDLSTEMVEKDLQVEQMANQIQELKELVGARENTIEDMEANEDVDIEGGVEPEPASSLDTAGSGRPPSPESSVASFVH

SEQ ID NO: 79204 - protein, 725 aa, Zea mays
  Coding DNA Sequence Number=SeqID_37425
  Homolog annotation: Hit_ID=Q8RUV9; Match level="QueryCoverage=23%, HitCoverage=26%, E-value=2e-63, Identity=57%"; Hit description =Putative beta-galactosidase
  Subcellular localization annotation: CTP_CleavageSite=30; ConfidenceScore=5.25e-01
PRPRPGEPRPPPRVLGPGEPLPSPRPARPRPAAPFTGEPRAPSASPRPASPPRPLCPRRPGVLAPSAGGSAPAHAPSPRRARPIASPRSPAVPRRLRPRRALRRPCPAPRPCPGDSRPVCLTGRLAPHVVPFHPRLCPYTRCACPSVRDPHAPASPRVPRQPPYASSLRPLTDVVARLHCARRGSHPQPIARPPSPCPCSRPHPPAVPPHRAPTATAIKAPTRATHPCPRGRPRNLAVTRTTTNHYTWTTLVVDLQSGICDHRHRGREHRRTDDMREKTENKRRRGIEIHVGSSVVQLYAKESSKMMLEVLRKGPRTTAELEAPVADTSLVSADAPRVLADIVLDISGGEHAFIEADETKELLSPLTKPGNSYKRICFSNRSFGIGAANVAGPILDSVKNQLTKVDISDFVAGRSEDEALDVMRIFSKALEGSVLRYLNISDNALGEKDVRAFNELLKSQESLEELYVMNDGISEEAAKALYELIPATEKLKVLHFHNNMTRDEVELNKQISCTLPLTNKTNKQVTFKFKPKYGHLKDLHDLIRSMEKILVHGKYNDTSYGKNAIVTLSGGTHLVPAWSVSILPDCKTVAYNTAKIKTQTSVMVKKANSVEKEPEALRWSWMPENLKPFMTDHRDSFRHSQLLEQITTSTDQSDYLWYRTRYKYWQNYSADGAFVFQLQSPVKLHSGKNYVSLLSGTVGLKSAKTLVIVVENPDKFRVVAFSAHF

SEQ ID NO: 79205 - protein, 395 aa, Zea mays
  Coding DNA Sequence Number=SeqID_37426
  Gene Ontology: Mol. function=metalloendopeptidase activity; Cellular component=membrane; Biological process=proteolysis
  Homolog annotation: Hit_ID=Q94DI2; Match level="QueryCoverage=48%, HitCoverage=55%, E-value=2e-92, Identity=89%"; Hit description =Peptidase M48-like
  Pfam annotation: Domain name=Peptidase_M48; Domain location=197-381; Score=1.0; E_value=8.9e-05; Accession=PF01435.8; Description =Peptidase family M48
MRARQMIARSALDEVTYTGDFDRSPSTFRSSVSRDGRFPTVAGRYHLYVSYACPWASRCLAFLKLKGLDHAIGVTVMKPIFERTKESDEHLGWVFPAVADEEPGAEPNPLNGAWSVRELYEIASSNYAGKPTIPVLWDKQLKTVVNNESSEIIRMLNAEFNGIARNPRAGRVLISVPIVCSGRYMNERTQDDHYLDLKGLDPTLLNTEAPDLYIRQNPVPNAYTLAINSKKPFIVVHTSLVELLTPRELHTVVYSKQTHRLAVLAHELGHLKCDHGVWLTFANILTMGAYTVPGFGMVTGFLEEQLYRWLRAAELTCDRAALLVVQDPKVVISVLMKLAGGCPSLADKLNVDAFLEQARSYDKAASNPVGWYIRNAQTRELSHPLPVMRAREIDE

SEQ ID NO: 79206 - protein, 326 aa, Zea mays
  Coding DNA Sequence Number=SeqID_37427
  Gene Ontology: Mol. function=metalloendopeptidase activity; Cellular component=membrane; Biological process=proteolysis
  Homolog annotation: Hit_ID=Q94DI2; Match level="QueryCoverage=65%, HitCoverage=61%, E-value=1e-99, Identity=85%"; Hit description =Peptidase M48-like
  Pfam annotation: Domain name=Peptidase_M48; Domain location=13-214; Score=6.7; E_value=3.5e-05; Accession=PF01435.8; Description =Peptidase family M48
MNERTQDDHYLDLKGLDPTLLNTEAPDLYIRQNPVPNAYTLAINSKKPFIVVHTSLVELLTPRELHTIVYSKQTHRLVVLAHELGHLKCDHGVWLTFANILTMGAYTVPGFGMVTGFLEEQLYRWLRAAELTCDRTTLLVVQDPKVVISVLMKLAGGCPSLADKLNVDAFLEQARSYDKAASNPVGWYIRNAQTRELSHPLPVMRAREIDEWSRSQEYKTLMQKMFQMGLNRVYLGSSSLAGFRLDRAAATWQLRHREAKHPVHLHREKHWFSIVFATGKKVGRSKELLKPDEVIEQVDSRTVAASPLPYNVKLEEVESFFAQCGK

SEQ ID NO: 79207 - protein, 107 aa, Zea mays
  Coding DNA Sequence Number=SeqID_37428
  Gene Ontology: Mol. function=nucleic acid binding; Cellular component= ribonucleoprotein complex; Biological process=RNA processing
  Homolog annotation: Hit_ID=Q6K6X2; Match level="QueryCoverage=81%, HitCoverage=18%, E-value=7e-22, Identity=60%"; Hit description =Putative RNA recognition motif (RRM)-containing protein
MATTSSRGEASSSSPPRKTLMRSHLGLEGDAKPETVPEETVLVVVDILRRSTALRVLEDGKKVGRSKELLKPDEVIEQVDSRTVAASPLPYNVKLEEVESFFAQCSK

SEQ ID NO: 79208 - protein, 165 aa, Zea mays
  Coding DNA Sequence Number=SeqID_37429
  Homolog annotation: Hit_ID=Q948J0; Match level="QueryCoverage=19%, HitCoverage=6%, E-value=2e-07, Identity=81%"; Hit description =Putative pyrophosphate--fructose-6-phosphate 1- phosphotransferase
  Subcellular localization annotation: CTP_CleavageSite=85; ConfidenceScore=5.19e-01
MHPQQPGPRISALIVPSHTIAQWASTVDTSRFLIPGWVSFGSRSIVQQQHGNYVIARRSIQFISTTKNTDVSFIEFENCREMQFAAMKRGDLLELCRQHGFATRGSKFVLTCALLETSDFLTVSVLLYEKKLKRTSLENVNGTMQGSWNSYVNDDDRALLKENSF

SEQ ID NO: 79209 - protein, 152 aa, Zea mays
  Coding DNA Sequence Number=SeqID_37430
MKRRDLLELCRQHGFATRGSKFVLTGALLMAKDHLFLAAVITMEWMGTGFVIANLAWEELLEVCISSPWEGSKEKLLKVSISLPWKGPREKLLKVSISLSSEGQKLELQSPRNNSKAYGEELPSIRSGYSRGPRRSSPPMERAECNGGSPMR

SEQ ID NO: 79210 - protein, 73 aa, Zea mays
  Coding DNA Sequence Number=SeqID_37431
MAGGIKLAGAKGKWLAGEETLGDTGVSQDDSQQKGHEVKTFEWIIFKNPLEARGLHPLGAPSAHPMNRHFKSR

SEQ ID NO: 79211 - protein, 241 aa, Zea mays
  Coding DNA Sequence Number=SeqID_37432
MLFGQSHWPPFATCSAGPKNQMNKEKDPKLNDDECVSQLKLKEMMCAITEAFKKIPGLCGCRCFGSDRAPGVAPQGAFWSRTPTHPRLVPMYGAPVREGRATSVITAWMLLGRLGLLRPGLVLICLTVRSSQAHKGDDLTNYGAFGPFVRSFILLVDPGDICPPQAPDLKPDFEINGPKIPGPACDNPLEGLHFRYYQKSLSSSTRVFSERSAFCFFGDDDSLGAPKVHPMGVAPELRVDF

SEQ ID NO: 79212 - protein, 135 aa, Zea mays
  Coding DNA Sequence Number=SeqID_37433
MEVTAAAWCFGGWAVVLPCAMEVAKGSSTGCLGQQAWGRGLWLGKWWLGHGKNKEGEAGRRPWARPGKVELLLGAMYSREREEGCHGAGENGEGLGHGEAFARRPLQGRWSSCPRNRKGRRLGGAAQGGMRAPLA

SEQ ID NO: 79213 - protein, 140 aa, Zea mays
  Coding DNA Sequence Number=SeqID_37434
MACGLARSDGAAAAEHKAELEAGHGQGKWSCCLAPCTTERGRKGTMRSLASAMAKEGEGGRGASCPVLKRNREGAGQRRWEQGARWPPWLGCGARRGDWQPWKSQGCHGRSFCAASKSGKVELAPMGEEGQGREQAWAPD

SEQ ID NO: 79214 - protein, 174 aa, Zea mays
  Coding DNA Sequence Number=SeqID_37435
MARLWSSQGRLAAMEVAGAPWEELLRCVQIREGGARSHGRRRAGEGAGLGAGLRKKGLGAMERKGVELPALCLLRVGKKSQGEKKWRLGKIEGWEWKISMACYNGPDHAWASMLDEAARWDDLVTGLRPMSYGAKGVPARCLVSVGPTTTAKASSEGWRLRLRPNICPPRDQFD

SEQ ID NO: 79215 - protein, 195 aa, Zea mays
  Coding DNA Sequence Number=SeqID_37436
MKDCPSHLRTDLSSLLTYTLIKYKHSRLYGQSLDLNLHGPNPGIMMAREHQGDKEGECFVWFGQGGGLVPFDIIAKPLGTSNCITFESQRIGVLQSCTMRCLCIPVDGLSGVGMRIECGCPSTDFGWVLPFLPEAGSVEANTAVLGRGDLDQDGDSLKNMPRSRIGSGEAEFGETPEGYLGRGVALDPSTSGNVP

SEQ ID NO: 79216 - protein, 249 aa, Zea mays
  Coding DNA Sequence Number=SeqID_37437
MQQYGCAACQWNRQARRLRDGLVAACQRSGQSSLNAEALHRLPVEWTGLIKIPRRHITCEWIGQAVRLIRNKCRGHAAQRPYVRLRPLAYVTCTMPRGSIGAPPERGVEAYTVWSGHASAPDHRLALIKVWVFFVPESRDPAVSGLDPTQRGPEPILGVRFAPVEVLDLTRRSGTFPEVEGSRATPRLRYPSRVSTNSASPKPVLGRDVFSGESSSRPGSPHPRTVVSVSPKPSSGKGDKLKARPYEDC

SEQ ID NO: 79217 - protein, 634 aa, Zea mays
  Coding DNA Sequence Number=SeqID_37438
  Gene Ontology: Mol. function=oxidoreductase activity; Cellular component=integral to membrane; Biological process=electron transport
  Homolog annotation: Hit_ID=Q0MRQ8; Match level="QueryCoverage=80%, HitCoverage=65%, E-value=0.0, Identity=69%"; Hit description =Respiratory burst oxidase protein A
  Pfam annotation: Domain name=FAD_binding_8; Domain location=283-407; Score=172.6; E_value=9.5e-49; Accession=PF08022.2; Description=FAD -binding domain
  Pfam annotation: Domain name=Ferric_reduct; Domain location=85-242; Score=149.6; E_value=8.3e-42; Accession=PF01794.9; Description =Ferric reductase like transmembrane component
  Pfam annotation: Domain name=NAD_binding_6; Domain location=413-542; Score=76.7; E_value=7.2e-20; Accession=PF08030.2; Description=Ferric reductase NAD binding domain
  Pfam module annotation: Pfam domain module=FAD_binding_8::Ferric _reduct::NAD_binding_6; Domain location=283-407::85-242::413-542
  Subcellular localization annotation: CTP_CleavageSite=22; ConfidenceScore=5.35e-01
MVTASGPTNMGASASLARTMVPSSHRTPLQRRMNKAVDLVHENWKRIWVLSLWGVLNMALFVFKFTQYRRRAVFEVMGYCVCIAKGAAETLKLNMALILLPVCRNTLTRLRSTALSKVVPFDDNINFHKVIALAIAIGSATHTLAHVLCDFPRLVACPKDKFMEKLGPFFNYAQPTWATLLSSIPGWTGILLILIMSFSFTLATHSFRRSVVKLPSPLHHLAGFNAFWYAHHLLVIAYVLLVMHSYFIFLTKQWYKRTTWMYLAVPVVFYASERSIRRIREKSYRVSIIKAAIYPGNVLSLYMKKPTSFKYKSGMYMFVKCPDVSPFEWHPFSITSAPGDDYLSVHIRTLGDWTSELRNLFGKACEAEVTSKKATLARLETTVVAHGLAEDTRFPKVFIDGPYGAPAQNYRKYDILLLIGLGIGATPFISILKDLLNNIKSNEDVIEMHNYLTSVYEEGDARSALIAMVQSLQHAKDGVDIVSGSKIRTHFARPNWRKVFSDLANAHKNSRIVALVALWNWELGLGLTGPRAVCLVSSKRGTYKDTEPRRVGPGAKWKEITNAYNAWAISERHNVRSPYSIDMSRLLPRYARVMMSVVHATVWMCRLPMEWTGTPPAGWSGHRPSAEWTGLIKC

SEQ ID NO: 79218 - protein, 132 aa, Zea mays
  Coding DNA Sequence Number=SeqID_37439
  Gene Ontology: Mol. function=serine esterase activity
  Homolog annotation: Hit_ID=Q010S2; Match level="QueryCoverage=69%, HitCoverage=31%, E-value=4e-09, Identity=31%"; Hit description=[R] KOG1516 Carboxylesterase and related proteins
MGFHGSRGSPESWQRKMKVTLRFLRRVSYRWISQLIALLIYAVLLIPGFIKVGYYYFFSRHVIRSVIYGEQPRNRLDLYIPKDNSKSSSVVAFVTGEAWIIGYKAWGALCWDHASSSKVLQEETASAKAVYT

SEQ ID NO: 79219 - protein, 292 aa, Zea mays
  Coding DNA Sequence Number=SeqID_37440
  Homolog annotation: Hit_ID=Q010S2; Match level="QueryCoverage=43%, HitCoverage=45%, E-value=4e-22, Identity=34%"; Hit description=[R] KOG1516 Carboxylesterase and related proteins
  Pfam annotation: Domain name=KOW; Domain location=207-243; Score =37.8; E_value=3.7e-08; Accession=PF00467.19; Description=KOW motif
MENVVSYRWISQLIALLIYAVLLMPGFIKVGYYYFFSRHVIRSVIYGEQPRNRLDLYIPKDNSKSSSVVAFVTGGAWIIGNFPQGTISDMVSDASEAISFICNNVVSFGGDPNKIYLMGQSAGAHIAACALLEQAIKESKGENTYWNSDDEREMCARTIYRTNIDKKVTQADLKLFFESICGELKVCRNGTIKIDLETNKIMDFIKFDVGNVVMVTGGRNTGRVGVIKNREKHKGSFETIHANSKPEEDFTVPANEAQAMTSMRPTEETKRINLEFADERKTAVISSSLDDK

SEQ ID NO: 79220 - protein, 92 aa, Zea mays
  Coding DNA Sequence Number=SeqID_37441
  Homolog annotation: Hit_ID=Q69UJ1; Match level="QueryCoverage=43%, HitCoverage=13%, E-value=4e-12, Identity=82%"; Hit description =Putative RNA-binding protein RBP37
MVPGLEKTDDEREMCARTIYRTNIDKKVTQADLKLFFESICGELKVCRNGTIKIDLETNKIMDFIKFDVGNVVMVTGGRNTGRVGVIKNREK

SEQ ID NO: 79221 - protein, 79 aa, Zea mays
  Coding DNA Sequence Number=SeqID_37442
  Gene Ontology: Mol. function=structural constituent of ribosome; Cellular component=ribonucleoprotein complex; Biological process =translation
  Homolog annotation: Hit_ID=O22424; Match level="QueryCoverage=92%, HitCoverage=27%, E-value=1e-23, Identity=71%"; Hit description=40S ribosomal protein S4
  Pfam annotation: Domain name=KOW; Domain location=6-42; Score=41.7; E_ value=2.5e-09; Accession=PF00467.19; Description=KOW motif
MDFIKFDVGNVVMVTGGRNTGRVGVIKNREKHKGSFETIHVEDSMGHQFATRMGNVFTIGKGNKPWVSLPKGNGKDRKR

SEQ ID NO: 79222 - protein, 104 aa, Zea mays
  Coding DNA Sequence Number=SeqID_37443
  Gene Ontology: Mol. function=structural constituent of ribosome; Cellular component=ribonucleoprotein complex; Biological process =translation
  Homolog annotation: Hit_ID=Q69UJ1; Match level="QueryCoverage=35%, HitCoverage=12%, E-value=8e-13, Identity=91%"; Hit description =Putative RNA-binding protein RBP37
  Pfam annotation: Domain name=KOW; Domain location=61-97; Score=35.6; E_value=1.7e-07; Accession=PF00467.19; Description=KOW motif
MSDDEREMCARTIYCTNIDKKVTQADLKLFFESRCGEVKVCRNGTIKIDLETNKIMDFIKFDVGNMVMVTGGRNTGRVGVIKNREKHKGSFETIHVLLGAFCYV

SEQ ID NO: 79223 - protein, 470 aa, Zea mays
  Coding DNA Sequence Number=SeqID_37444
  Homolog annotation: Hit_ID=Q9SWB5; Match level="QueryCoverage=38%, HitCoverage=99%, E-value=5e-52, Identity=83%"; Hit description=Seed maturation protein PM37
  Pfam annotation: Domain name=DnaJ; Domain location=48-98; Score=57.0; E_value=6.4e-14; Accession=PF00226.21; Description=DnaJ domain
  Pfam annotation: Domain name=Fes1; Domain location=282-377; Score= -27.0; E_value=0.065; Accession=PF08609.1; Description=Nucleotide exchange factor Fes1
  Pfam module annotation: Pfam domain module=DnaJ::Fes1; Domain location=48-98::282-377
  Subcellular localization annotation: CTP_CleavageSite=26; ConfidenceScore=5.38e-01
MGRLMRSTSCSSNRCLPSQSRRPRTAASRRFGGTLMFGRAPKKSDNTRYYEILGVSKDASQDDLKKAYRKAAIKNHPDKGGDPEKFVLTHLDNRQLLIKSNPSKVVKPDSFKAINDEGMPMYQRPFMKGKLYIHFSVEFPDSLSPKQCKALEAVLPPKPVSQHTDMELDECEETMPYDVNIEEEMRRRQQQHQHQEAYDEDDDVPGGGQRVQCAQHDSRRRQLQCRSGEGEELRNISTLRGEPRQWATGKDDAKILSEAEARAGGGGEGLLTADEGREFASLYSMLQWAIGNSDPDKLREKAAELVKLSAEELLKRQMEIKELMEKFKAPSDAELIKIAIADLNNSSLEDRQRALQELLILVEPIDNANVVEMISAVPDLDLQEKALLAVRNLLHLTSADATDLQKFSGLDDSLNALKVQLDELTSHEEQREYAPEIEILRREVHTVFQRKTDQVLIHTFNGAGVADSLV

SEQ ID NO: 79224 - protein, 141 aa, Zea mays
  Coding DNA Sequence Number=SeqID_37445
  Gene Ontology: Mol. function=heat shock protein binding; Cellular component=membrane; Biological process=protein folding
  Homolog annotation: Hit_ID=Q0PMD7; Match level="QueryCoverage=99%, HitCoverage=32%, E-value=4e-64, Identity=82%"; Hit description=J -domain protein
  Pfam annotation: Domain name=DnaJ_C; Domain location=1-106; Score= -15.7; E_value=3.5e-05; Accession=PF01556.9; Description=DnaJ C terminal region
QKEHPKFKRKDDDLFYEHTRTLTESLCGFQFVLTHLDNRQLLIKSNPGEVVNPGEVVKPDSFKAINDEGMPMYQRPFMKGKLYIHFSVEFPDSLSPEQCKALEAVLPPKPVSQYTDMELDECEETMPYDVNIEEEMQRRQQ

SEQ ID NO: 79225 - protein, 472 aa, Zea mays
  Coding DNA Sequence Number=SeqID_37446
  Homolog annotation: Hit_ID=Q0PMD7; Match level="QueryCoverage=46%, HitCoverage=56%, E-value=6e-96, Identity=72%"; Hit description=J -domain protein
  Pfam annotation: Domain name=DnaJ_C; Domain location=308-437; Score =6.9; E_value=5e-07; Accession=PF01556.9; Description=DnaJ C terminal region
  Pfam annotation: Domain name=DnaJ_CXXCXGXG; Domain location=236-315; Score=71.2; E_value=3.3e-18; Accession=PF00684.9; Description=DnaJ central domain (4 repeats)
  Pfam module annotation: Pfam domain module=DnaJ_C::DnaJ_CXXCXGXG; Domain location=308-437::236-315
MHARAKYSPAVLPRRTRTRLDRRNAVKRVDYEAGAGASVSVAASWSFSSSVDQQRSTGPGLQPSRSLDLAPGADLRISGSVEGEVDELCRSLGLSGPEDFAIPVAAWEARKSRSNSDLSEGSQSLIASQEATPQKQQPVHQGRVQLALAKAEILCIQKGPGLPIASQHDDAVECDIDDATTSAGVYHFRQPTDKPFRTEHMRRLEFAFWFKVSTPPRRSGGRRSRIGRSKTHKRWLRRELGITNDVTSLLQSGASSRCAGCQGSGFKVQIRQLGHGMIQQMQHPCNECKGSGETISDKDRCPQCKGVKVVPEKKVLEVPDTATGDIIFVLQQKEHPKFKRKGDDLFYEHTLTLTESLCGFQFVLTHLDNRQLLIKSNPGEVVNPGEVVKPDSFKAINDEGMPMYQRPFMKGKLYIHFSVEFPDSLSLEQCKALEAVLPPKPVSQYTDMELDECEETMPYDVNIEEEMQRRQQ

SEQ ID NO: 79226 - protein, 50 aa, Zea mays
  Coding DNA Sequence Number=SeqID_37447
MARRKLGQGQGRVPSWARSRDTATDEDAMAARQGTRGTEKRESTAGTYER

SEQ ID NO: 79227 - protein, 197 aa, Zea mays
  Coding DNA Sequence Number=SeqID_37448
MASSRAQEARNNRATNRGARGARDPEIQGAGRAQGDTRAQENSRRGDQGARPGEQQGARRARDGRARRAALGSLAQRAEQGDEKRLRAGLNPSREAGARGGKNQGARHMGAPAMEMRRERNADQGRGCAGGRTAQLPRLRASREVGVGAGPSAVLGEEPGYRDRRGRHGSSSGNERNIEEREHGRVFEESQGGAVRR

SEQ ID NO: 79228 - protein, 189 aa, Zea mays
  Coding DNA Sequence Number=SeqID_37449
MASSRAQEARNNRATNRGARGARDPEIQGAGRAQGDTRAQENSRRGDQGARPGEQQGARRARDGRARRAALGSLAQRAEQGDEKRLRAGLNPSREAGARGGKNQGARHMGAPAMEMRRERNADQGRGCAGGRTAQLPRLRASRVRGRSTTPGRISASREEQRELGEHGKGPRPREDEQGRAGDQHGARP

SEQ ID NO: 79229 - protein, 128 aa, Zea mays
  Coding DNA Sequence Number=SeqID_37450
MGPTRHASWPGTEEAKPPRAERITAQRLQAHLHLRLNQRVKGRTAMKVACNCTTETHPFDFDASSMEDQAHTSSGSPLPWREDDAPVFRPSNGSRNGCPANHPSRRINFAAGQATPLAGEAGDVSPPP

SEQ ID NO: 79230 - protein, 274 aa, Zea mays
  Coding DNA Sequence Number=SeqID_37451
MGPTRHASWPGTEEAKPPRAERITAQRLQAHLHLRLNQRVKGRTAMKVACNCTTETHPFDFDASSMEDQAHTSCNRRAGYYVRKTAPPLTLMSRLLDCGTNAATQGNPAHGPTVPTKRIGQGSVSRGRRHDGRYGQKWAGSNGGSRRAEAAVKSSASSRPLLEQQGALSHGVKTTRPCSVPRTARATAAPRTTRPVALTSRQGRRHLWQVKRATFHLHHDDRVKKGTRKGDNPKGILLREGSGPRALLLIRGLKAGPSEGFDSRPRALGLQAHY

SEQ ID NO: 79231 - protein, 145 aa, Zea mays
  Coding DNA Sequence Number=SeqID_37452
  Homolog annotation: Hit_ID=Q6QP51; Match level="QueryCoverage=68%, HitCoverage=48%, E-value=2e-20, Identity=53%"; Hit description =Putative growth-regulating factor 1
  Subcellular localization annotation: CTP_CleavageSite=42; ConfidenceScore=5.23e-01
MQAACNRTIETHPFNFDASSVEAQTHTAGDTFGRRSGRRFTSAMMTVSKKRAPSPPTDQRFKGWPLGRVRQPPQSTRAPRPLLIRGSKAGPSEGFNSRLRARRARDDSGYVRYMAEARATLSRGSGAALANPASAKPLTASTNQP

SEQ ID NO: 79232 - protein, 84 aa, Zea mays
  Coding DNA Sequence Number=SeqID_37453
MGSTFSKHFYKTESLIIEKPYLDSLNQHTLESLFFSRVRKRQIFVASAPRWFPRKKNKSEAAGGLGPPYRTFVKELIGRSFYLP

SEQ ID NO: 79233 - protein, 62 aa, Zea mays
  Coding DNA Sequence Number=SeqID_37454
MVSLIIEKPYLDSLNQHTLESLFCSRVRKRQIFVASAPRWFPRKKNKSEAAGGLGPPYRTFV

SEQ ID NO: 79234 - protein, 84 aa, Zea mays
  Coding DNA Sequence Number=SeqID_37455
MNGFVKKLASAGQVIELGIHFSKHFFKTESLIIEKPYLDSLNQHTLESLFFSRVRKRQIFVAFAPRWFQRKKHKSEAAGGHGPP

SEQ ID NO: 79235 - protein, 106 aa, Zea mays
  Coding DNA Sequence Number=SeqID_37456
MTEDPLAGHMPRHGIHFSKHFDKTESLIIEKPYLDSLNQHTLESLFFSRVRKRQTFVASAPRWFPRKKNKSEAAGGLGPPYRTFMKELIGRSFYLPWYCNNITLHS

SEQ ID NO: 79236 - protein, 106 aa, Zea mays
  Coding DNA Sequence Number=SeqID_37457
MTEDPLAGHMPRHGIHFSKHFCKTESLIIEKPYLDSLNQHTLESLFFSRVRKRQIFVAFAPRWFPRKKNKSEAAGGLGPPYRTFVKELIGRSFYLPWYCNNITLHS

SEQ ID NO: 79237 - protein, 348 aa, Zea mays
  Coding DNA Sequence Number=SeqID_37458
  Pfam annotation: Domain name=BRF1; Domain location=249-336; Score= -26.9; E_value=0.1; Accession=PF07741.3; Description=Brf1-like TBP -binding domain
MEPAVLNRERVALDKKNRMPIFKLFDDYSDEDFYGVQRKYSIVARVEVKFPIEPRYRDRQHYILSDINGAKIEAIATRYEIVKYFNSLLHEKHVYKMHNVWFGLNPGAFNFRHLNGTMELYFTQQTLVEPYVVPVQMPPFPKHIFLNLDDIAELPNRTLVDIMAIVVHLDTIHRTMWGTFRKIVIMDARWSLHTIKVWGDLLNKNALHWALANENYSIIIGTMFRRFRKQDQMGHNAGRKPFTDISSNIIRGDQNELLGPMLDAKERKRKRDRERYAAMSVEQKNEKNRKRRETRQRNKGHNVIPNVSGAASIVKEARHEVLMSYQQRAEALEGLLEFSAQLLPQERF

SEQ ID NO: 79238 - protein, 535 aa, Zea mays
  Coding DNA Sequence Number=SeqID_37459
  Gene Ontology: Mol. function=helicase activity; Biological process =viral genome replication
  Homolog annotation: Hit_ID=Q1EPC6; Match level="QueryCoverage=51%, HitCoverage=18%, E-value=1e-107, Identity=63%"; Hit description=DNA helicase homolog, putative
MGHNVGRKPFTDISSNIIRGDQNELLGPMLDAKERKRKRDRERYAAMSVEQKNEKNRKRREARQRNKGHNVIPNVSGGDQNEQLRLYNQTPRWKEGKLEYIRKRRALQASTLNQGSIAMEVPTYTSEVLHSTADVLEPDSSSDNACDWVIPEYTSTPFMPASTQTEDVGSPDMSTEPLKRKHHVRPGERQAILARQNKKFEANIARNVATLTEDTISDVGQMDDSTQPGSTIEINNTVDDDDEGVIFGEDNDENEGYIFADEDTNEDFEIDGTQDQSVVTDVPDPYDKVYSNIPEETHMLKHVPDCGYCTAKKFEYEPPGFCCRGGKVELAPLETPPQLRRLWDSADSDARHFRDNISMTTNMRDSGIYTFRAQGMMYHNIKSFGSECGAEHKHLELYFYDDDPSLEHRFRKCREDQIQKDQEVIKQIVGILRGNPYSEHLRSMGHVENLADYHIALNLDQTLNQKTYNTPLTSEVAAVWIEGSERRGQFSKSVMLHGKDRSSHGIRSYHGCYDALSYPLFFPRGELGWHANIPK

SEQ ID NO: 79239 - protein, 417 aa, Zea mays
  Coding DNA Sequence Number=SeqID_37460
  Gene Ontology: Mol. function=helicase activity; Biological process =viral genome replication
  Homolog annotation: Hit_ID=Q1EPC6; Match level="QueryCoverage=66%, HitCoverage=18%, E-value=1e-107, Identity=63%"; Hit description=DNA helicase homolog, putative
MEVPTYTSEVLHSTADVLEPDSSSDNACDWVIPEYTSTPFMPASTQTEDVGSPDMSTEPLKRKHHVRPGERQAILARQNKKFEANIARNVATLTEDTISDVGQMDDSTQPGSTIEINNTVDDDDEGVIFGEDNDENEGYIFADEDTNEDFEIDGTQDQSVVTDVPDPYDKVYSNIPEETHMLKHVPDCGYCTAKKFEYEPPGFCCRGGKVELAPLETPPQLRRLWDSADSDARHFRDNISMTTNMRDSGIYTFRAQGMMYHNIKSFGSECGAEHKHLELYFYDDDPSLEHRFRKCREDQIQKDQEVIKQIVGILRGNPYSEHLRSMGHVENLADYHIALNLDQTLNQKTYNTPLTSEVAAVWIEGSERRGQFSKSVMLHGKDRSSHGIRSYHGCYDALSYPLFFPRGELGWHANIPK

SEQ ID NO: 79240 - protein, 115 aa, Zea mays
  Coding DNA Sequence Number=SeqID_37461
  Gene Ontology: Biological process=protein transport
  Homolog annotation: Hit_ID=Q6K912; Match level="QueryCoverage=58%, HitCoverage=29%, E-value=3e-19, Identity=77%"; Hit description=SNF7 -like protein
MAEFENLEAQGWPTKHLEFLSVEKYFSLLWHEHDNVNDFEQSHLKAPEFELAVESLLYALVTEVRLEEKTKAPADTEAAPEDIDDVIELPDVPTKVPERPEAPEKNKVLEEPLPA

SEQ ID NO: 79241 - protein, 101 aa, Zea mays
  Coding DNA Sequence Number=SeqID_37462
  Gene Ontology: Biological process=protein transport
  Homolog annotation: Hit_ID=Q6K912; Match level="QueryCoverage=66%, HitCoverage=29%, E-value=6e-21, Identity=79%"; Hit description=SNF7 -like protein
MSLCVCREAFLLNTQWHEHDNVNDFEQSHLKAPEFELAVESLPYAPVTEVRLEEKTKAPADTEAAPEDINDVIELPDVPTKVPERPEAPEKNKVLEEPLPA

SEQ ID NO: 79242 - protein, 207 aa, Zea mays
  Coding DNA Sequence Number=SeqID_37463
  Gene Ontology: Mol. function=transporter activity; Cellular component= integral to membrane; Biological process=oligopeptide transport
  Homolog annotation: Hit_ID=Q9SK95; Match level="QueryCoverage=43%, HitCoverage=15%, E-value=3e-24, Identity=58%"; Hit description =Similar to peptide transporter
MSLCVCREAFLLNTQWHEHDNVNDFEQSHLKAPEFELAVESLPYAPVTEVRLEEKTKAPADTEAAPEDINDVIELPDVPTKVPERPEAPEKNKGHFVILQAASSTFFMKQAATLDRRIGRHFQVPPVALHSFISITIMVIIPIYDRVLVPVSRRYSGKPSGITMLQRIGTGMFLSFLSMVIAALVENRSCDLEAATWRLYPSYGRAI

SEQ ID NO: 79243 - protein, 135 aa, Zea mays
  Coding DNA Sequence Number=SeqID_37464
MAREPLRGLYKVPLASENPLQFIGRSSTGFLADSHRSKINQGPPRTDLSPTALAPFGEVGGPGVNVTETHNTAEADGGLNPAFLGDSLTKVPAKGYQTTLAVRSQVKGRDQIRPRSKRYAPGAAGLKTNDQDLKT

SEQ ID NO: 79244 - protein, 99 aa, Zea mays
  Coding DNA Sequence Number=SeqID_37465
MARDPLRGLYKVPLASENPLQFIGRSSTGFLADSHRSKINQGPPHTDLSPTALAPFGKVRGFYAKVLRLRTLPTGRRVDILKAEGLFSNVDPRRGMGKN

SEQ ID NO: 79245 - protein, 273 aa, Zea mays
  Coding DNA Sequence Number=SeqID_37466
MARDPLRGLYKVPLASENPLQFIGRSSTGFLADSHRSKINQGPPRTDLSPTALAPFRLWTGPRFPENSGVSAQEVRDPVHSQIGWRVDFSVFQGLLCKVSRPKGYLRILADGSRLDGSDLNKRREKPAITTGATSHALRPNSEARAPTHLPDDDGGQTRARGGGSSGGFSTDCGREGGREVSRGRMGHGGSLLSPGVQVQAEGKVAHDPGNGGDFRASRCEGRGEGADMRVPRTRGIHGKHAHIGDCQWAPSVRWLRARGTEKRGWKVGPRRH

SEQ ID NO: 79246 - protein, 105 aa, Zea mays
  Coding DNA Sequence Number=SeqID_37467
MARRRPRSTVADLRSCTEDGGGGASIDSLRMVNHSDSNVGLRQRVQCSDDCSIAWEHVTTGACVGRSVMPNFWNGERLQLVKIPRKRENDIRKKSRGIQVDHWIT

SEQ ID NO: 79247 - protein, 88 aa, Zea mays
  Coding DNA Sequence Number=SeqID_37468
MARRRPGATVADLRGCTEDGGSSSGDVWDKGEVGEGIERRVASSPSPQHLPSEGPVRLSHLVPKTSLDGGDAALARSGSAGVFDMTVD

SEQ ID NO: 79248 - protein, 183 aa, Zea mays
  Coding DNA Sequence Number=SeqID_37469
  Homolog annotation: Hit_ID=Q5N802; Match level="QueryCoverage=36%, HitCoverage=15%, E-value=1e-17, Identity=59%"; Hit description =Putative bHLH transcription factor
MAIENPYIKEIIDDDADRPKEVCSTFALNLLVGCLRYRWKETVGDESREFGRYMRQREEQEKQEAELFTRAPVTKHDKQIEKRIRRQLHGLRVVIMRRTATYQSHPTLIGNHRCMVHQSCGPPHFSLETSGAPLSYLSQPHHGSPLGCMDNQSCMHPLDTAFCLAINPQYHFLNGVSDASSQL

SEQ ID NO: 79249 - protein, 170 aa, Zea mays
  Coding DNA Sequence Number=SeqID_37470
  Homolog annotation: Hit_ID=Q5N802; Match level="QueryCoverage=39%, HitCoverage=15%, E-value=1e-15, Identity=55%"; Hit description =Putative bHLH transcription factor
MARSPMLSARTPALTSWNIIAMFPPTLENEPLMWKTRRLPMLESVWILSAVRLLMLMCQFSETGVIHSIQIYTKSNPYNDKLRYGSRGPSSHFVPVCDQVHQSCGPPHFSLETSDASLSYLSQPHHGSPLGCMDNQSCMHPLDTTFCLAINPQYHFLNGVSDASSQLQLI

SEQ ID NO: 79250 - protein, 63 aa, Zea mays
  Coding DNA Sequence Number=SeqID_37471
MEALLAAWTTRVMHPLDMAFCLAINPQYHFLNGVSDASSQEERAFTRPLGAPPRLALLKDSAF

SEQ ID NO: 79251 - protein, 679 aa, Zea mays
  Coding DNA Sequence Number=SeqID_37472
  Gene Ontology: Mol. function=helicase activity; Cellular component =membrane; Biological process=viral genome replication
  Homolog annotation: Hit_ID=Q10GM7; Match level="QueryCoverage=95%, HitCoverage=42%, E-value=0.0, Identity=63%"; Hit description =Expressed protein
  Pfam annotation: Domain name=DUF889; Domain location=388-611; Score =262.9; E_value=6.6e-76; Accession=PF05970.5; Description=Eukaryotic protein of unknown function (DUF889)
GVTIKAVKYLFKYIYKGHDRASVVMRDASKEYDDVDEIKQYRDARWVTPPEALWRIYGFELSQISPPVMQLQLHLPNMHMANSLHEEARGILYRDFPEWYTWQSGKGKVWQRRKRDTGGQVGRIVSAHPAEGERYYLRVLLNHVTGATSYVGLRTVDGVTLPTFREAAERRGLLESDNTLDECLTERALFQMPSALRRLFATILVYCEPSDVAVLWQKHKDSMSEDYQHRSQNKTHVEQMVLIDIRNMLQSMGKDINTFPLPPIINAYDDAIGTAREVYEEESIQPTAGDVALKDSLNEEQRTAYDKIMSAIDTDQGGLFFVDGPGGTGKTYLYRVLLATLRNQGKIAVATATSGVAASIMPGGRTAHSRFKIPLTIDDGAVCSFTKQSGTAELLRKAALIIWDEASMTKRQAVEALDNSMRDIMGRPTLPFGGGGTEDTNSDGDIRLPDDVCVPYSGSDSDLDNLIDFAFPNLNENMSDSTYITSRAILSTRNDWVDMINVKMIDRFQGEHMVYHSFDSATDDPHNYYPPEFLNTLTPNGLPPHVLKLKIGCPVILLRNIDPANGLCNGTRLVVRGFQRNSIDAEIVLGQHVGKRIFLPRIPLCPSDEEMFPFQFKRKQFPVRLSFAMTVNKAQGQTIPNVGVYLPEPVFSHDVGRSPCKITFMPTTFANDLWGSVKA

SEQ ID NO: 79252 - protein, 576 aa, Zea mays
  Coding DNA Sequence Number=SeqID_37473
  Gene Ontology: Mol. function=helicase activity; Cellular component =membrane; Biological process=viral genome replication
  Homolog annotation: Hit_ID=Q10GM7; Match level="QueryCoverage=94%, HitCoverage=34%, E-value=0.0, Identity=66%"; Hit description =Expressed protein
  Pfam annotation: Domain name=DUF889; Domain location=285-508; Score =262.9; E_value=6.6e-76; Accession=PF05970.5; Description=Eukaryotic protein of unknown function (DUF889)
SGKGKVWQRRKRDTGGQVGRIVSAHPAEGERYYLRVLLNHVTGATSYVGLRTVDGVTLPTFREAAERRGLLESDNTLDECLTERALFQMPSALRRLFATILVYCEPSDVAVLWQKHKDSMSEDYQHRSQNKTHVEQMVLIDIRNMLQSMGKDINTFPLPPIINAYDDAIGTAREVYEEESIQPTAGDVALKDSLNEEQRTAYDKIMSAIDTDQGGLFFVDGPGGTGKTYLYRVLLATLRNQGKIAVATATSGVAASIMPGGRTAHSRFKIPLTIDDGAVCSFTKQSGTAELLRKAALIIWDEASMTKRQAVEALDNSMRDIMGRPTLPFGGGGTEDTNSDGDIRLPDDVCVPYSGSDSDLDNLIDFAFPNLNENMSDSTYITSRAILSTRNDWVDMINVKMIDRFQGEHMVYHSFDSATDDPHNYYPPEFLNTLTPNGLPPHVLKLKIGCPVILLRNIDPANGLCNGTRLVVRGFQRNSIDAEIVLGQHVGKRIFLPRIPLCPSDEEMFPFQFKRKQFPVRLSFAMTVNKAQGQTIPNVGVYLPEPVFSHDVGRSPCKITFMPTTFANDLWGSVKA

SEQ ID NO: 79253 - protein, 189 aa, Zea mays
  Coding DNA Sequence Number=SeqID_37474
  Gene Ontology: Mol. function=helicase activity; Cellular component =membrane; Biological process=viral genome replication
  Homolog annotation: Hit_ID=Q1EPC6; Match level="QueryCoverage=98%, HitCoverage=11%, E-value=6e-86, Identity=81%"; Hit description=DNA helicase homolog, putative
  Pfam annotation: Domain name=DUF889; Domain location=1-90; Score= -16.1; E_value=2.1e-10; Accession=PF05970.5; Description=Eukaryotic protein of unknown function (DUF889)
MDDPHNYYPHEFLNTLTPNGLPPHVLKLKIGCPVILLRNIDPANGLCNGTRLVVRGFQRNSIDAEIVLGQHVGKRIFLPRIPLCPSDEEMFPFQFKRKQFPVRLSFAMTVNKAQGQTIPNVGVYLPEPVFSHGQLYVALSRATARSNIKILVMPAIDGRKKSRKGVKKNPTVDCGTYTKNIVYKEVLTN

SEQ ID NO: 79254 - protein, 69 aa, Zea mays
  Coding DNA Sequence Number=SeqID_37475
MSSPCSAAAKWLLHCGGIAPTLISTVLAPSATPPPDTVHVGVHVRRLHFYLLIRYAFHLGRCQRTGIIR

SEQ ID NO: 79255 - protein, 137 aa, Zea mays
  Coding DNA Sequence Number=SeqID_37476
MGAGAALSRAGGTCHEREQEETVEAPVRLTDPQSVRRPVSHGETPTLTSAKVKRVADQEVEVETPNMDSDVDSVGRRSSRWSEDGGDQSRSNSPTMKQPFGRRGARGRHGRIPVRERYFPRQESNRGNSMRQPEINM

SEQ ID NO: 79256 - protein, 345 aa, Zea mays
  Coding DNA Sequence Number=SeqID_37477
  Homolog annotation: Hit_ID=Q2R3L0; Match level="QueryCoverage=97%, HitCoverage=78%, E-value=2e-60, Identity=39%"; Hit description =Expressed protein
  Pfam annotation: Domain name=BRO1; Domain location=26-345; Score= -199.5; E_value=0.09; Accession=PF03097.8; Description=BRO1-like domain
  Subcellular localization annotation: CTP_CleavageSite=79; ConfidenceScore=5.20e-01
MGCGASSQKDAGAPRRRPVSVGDVVVFLPGLRVPRAVDLAQALGGCLARSAVDRLSALRSRVVDMAMRESAAALKPRRRAAARHGSSTANLLQALEDYLPALLGLVKEGSVLRNKVHFTWSNQEDNAELCVNPAPPQSQETAMPDAWYEANALLLPRSYGDGYAPRVSEESRRATVDVFLKAAGYLDCAVRHVLPKMPLELRRQLPVDLAEGNLKALSLQALGQGVDMQLGLAIDSPKATLAVKRRLACEMVKYWQQVQESIPELPISDGWGKKHRLFIKWKYVEAKAAAYYFHGLILDEGNTEKSHGMAIAALQASEEFLKESKRVSEAFHATPPTSRQDFPHT

SEQ ID NO: 79257 - protein, 208 aa, Zea mays
  Coding DNA Sequence Number=SeqID_37478
  Gene Ontology: Mol. function=acyltransferase activity; Cellular component=integral to membrane; Biological process=biosynthetic process
  Homolog annotation: Hit_ID=Q6Z6C7; Match level="QueryCoverage=84%, HitCoverage=34%, E-value=1e-76, Identity=79%"; Hit description =Putative beta-ketoacyl-CoA-synthase
  Pfam annotation: Domain name=ACP_syn_III_C; Domain location=68-152; Score=1.7; E_value=9.6e-06; Accession=PF08541.1; Description=3 -Oxoacyl-[acyl-carrier-protein (ACP)
  Pfam annotation: Domain name=Chal_sti_synt_C; Domain location=10-154; Score=13.2; E_value=0.00014; Accession=PF02797.6; Description =Chalcone and stilbene synthases, C-te
  Pfam annotation: Domain name=FAE1_CUT1_RppA; Domain location=1-53; Score=-211.6; E_value=0.02; Accession=PF08392.2; Description =FAE1Type III polyketide synthase-lik
  Pfam module annotation: Pfam domain module=ACP_syn_III_C::Chal_sti _synt_C::FAE1_CUT1_RppA; Domain location=68-152::10-154::1-53
EEDGEGVVGVSLSRDLMAVAGDALKTNITTLGPLVLPLSEQLLFMATLVAKKLLKMKKVKPYIPDFKLAFEHFCIHAGGRAVLDELESNLALTDWHMEPSRMTLHRFGNTSSSSLWYELAYSEAKGRIRRRHRVWQIAFGSGFKCNSAVWRALRSVNPAEETNPWMDEIDRFPVDVPKYLFFFPPFGLLVFSNAQQLIVFVSEYPKTA

SEQ ID NO: 79258 - protein, 126 aa, Zea mays
  Coding DNA Sequence Number=SeqID_37479
  Homolog annotation: Hit_ID=Q2QN95; Match level="QueryCoverage=76%, HitCoverage=15%, E-value=1e-29, Identity=79%"; Hit description=Amino acid transporter family protein, putative, expressed
  Subcellular localization annotation: CTP_CleavageSite=54; ConfidenceScore=5.02e-01
MSQFTLNLPQQYIPSKIAICLTVVNPYTKYALTMTSVALSIEEALPKKMQSYLVGMLVRTFLVLSTVAVALFFPYFDVFKFLSPGDGAAWIRVHNARGRFWRTFHLHFCGGFLYFGQLKQVDKKCA

SEQ ID NO: 79259 - protein, 154 aa, Zea mays
  Coding DNA Sequence Number=SeqID_37480
  Gene Ontology: Cellular component=integral to membrane
  Homolog annotation: Hit_ID=Q2QN95; Match level="QueryCoverage=75%, HitCoverage=19%, E-value=3e-46, Identity=80%"; Hit description=Amino acid transporter family protein, putative, expressed
  Pfam annotation: Domain name=Bac_ATP_syn_I; Domain location=29-134; Score=-55.5; E_value=0.085; Accession=PF05468.2; Description =Bacillus ATP synthase I
MEFSAFTVVTLVYAGVAVSGFLMFGESTMSQFTLNLPQQYIPSKIAICLTVVNPYTKYALTMTSVALSIEEALPKKMQSYLVGMLVRTFLVLSTVAVALFFPYFALVMALLGSVFTMLVIILGVSLSRDLMAVAGDALKTNIRTLGPLVLPLSE

SEQ ID NO: 79260 - protein, 148 aa, Zea mays
  Coding DNA Sequence Number=SeqID_37481
  Homolog annotation: Hit_ID=UPI0000162EFD; Match level="QueryCoverage =61%, HitCoverage=8%, E-value=6e-15, Identity=35%"; Hit description =HB-1; transcription factor
MELMEDERLELLELASRSKGLLSMVSLDSDTLQQLDSFRGMLGKFPPETVRLKDSRLLGELHIPLLKSIIKDIKDVARTPSVALGVNQSSSANPGGGHSVVAINLYVVVAICDCSNRQLKKRIDLFYGRSVEDGFGEGNVLLASIVEC

SEQ ID NO: 79261 - protein, 85 aa, Zea mays
  Coding DNA Sequence Number=SeqID_37482
MGPAGSATVLCYEDTVTQLHIAAQTKDCPYDSLINIHVAMFCKISLINLIAIMPILSCLIDLFYGRCVEDGFGEGNVLLASIVEC

SEQ ID NO: 79262 - protein, 108 aa, Zea mays
  Coding DNA Sequence Number=SeqID_37483
MVHLAHQKESIKACGAPFCKTPNYVVEYRGVKTKEESSIEQFFCNFNVQPFYFCKAALDLMVLTFPDRQLKKRIDLFYGRSVEDGFGEGNVLLASRKWRHYNPYKLVP

SEQ ID NO: 79263 - protein, 188 aa, Zea mays
  Coding DNA Sequence Number=SeqID_37484
MARGLGPTRHASWPRAEEAKPPRAVHATAQRLQAFLHFRPDQRVKGRTAVQAACNCAKWARPSNFQRTQHGGPGPRVMQPARRLLRASNCTATRTTTTPPRLRNQYRDSRQPRVRLSSASQDRRRLWQEKRATLRLRHNDRVKKGTPRHSISYPFPFPLSLSYNGDRERGIPRKGSFSVKETGPEPNY

SEQ ID NO: 79264 - protein, 192 aa, Zea mays
  Coding DNA Sequence Number=SeqID_37485
  Homolog annotation: Hit_ID=Q6QP51; Match level="QueryCoverage=66%, HitCoverage=51%, E-value=4e-12, Identity=48%"; Hit description =Putative growth-regulating factor 1
MTASKKVRHVIRFRTLFLFLFLSLTTGTGKGDTSKGILLREGNRPRAPLLIRGSKAGPSKGFNSRLRALGLRAHYWSEVRRLAPREGSTAASGHSGSAPTTDQGFVGWPPKGSTAASDAERGMTLAQSCEGLMGAIKSRLGPLKGHDLASPEPSLGQGKPTPEDSRLARGPVFAEKQPWPDRHTNRPYRRSI

SEQ ID NO: 79265 - protein, 167 aa, Zea mays
  Coding DNA Sequence Number=SeqID_37486
MSGDHAKKEMETGDKPTTSHGKASSEESRNKGKGKEKKSSSHKSHRSGDKKKKMRKVVYYETDTSSPSTSGSDAPSITSKRHERKKFTQSCKGLMGAIKSRLGPLKDTISPRPSPASGKGSRPRRIHVSPEGSLKQRTHLRLARGPVFAKKKPWPNRHADRPYRRSI

SEQ ID NO: 79266 - protein, 103 aa, Zea mays
  Coding DNA Sequence Number=SeqID_37487
  Subcellular localization annotation: CTP_CleavageSite=26; ConfidenceScore=5.36e-01
MASSSDAVSRTTRESSTLATTMRPPCLTMDSAVQLLWTASKRRLRGSLSYTAAHATTHWTRTTIRFCLNKKNSFGSSKEVVSPREPELKPFLDKPEPCQRGPK

SEQ ID NO: 79267 - protein, 92 aa, Zea mays
  Coding DNA Sequence Number=SeqID_37488
  Gene Ontology: Mol. function=protein phosphatase type 2C activity
MASSSDAVSRTTRESSTLATTMRPPCLTMDNAVQLLWTASKWRLRGSLSYTAAHATTNCLEQAILAGHLALDCQGRDHTLRGDHAYRKRTLS

SEQ ID NO: 79268 - protein, 101 aa, Zea mays
  Coding DNA Sequence Number=SeqID_37489
  Gene Ontology: Mol. function=protein phosphatase type 2C activity
  Homolog annotation: Hit_ID=Q2HW33; Match level="QueryCoverage=83%, HitCoverage=20%, E-value=1e-08, Identity=38%"; Hit description =Protein phosphatase 2C-like
MATVGGLHLPKKRFDINQWKYDEASFVMMKQEGDSYVAACAAVYDKLPRSRRLDAVQSSCTALSIVKHGGLMVVANVDDSRVVLDTASDDDAITPFSSSST

SEQ ID NO: 79269 - protein, 115 aa, Zea mays
  Coding DNA Sequence Number=SeqID_37490
MVSNLDAVIIAVEGVSATLDSTGPRRQGGRRQDIWRRPTGTCHIGCHIGKVGTNDTDVVVRYLGVNDDGAESSCTALSIVKQGGLMVVANVDDSRVVLDTASDDDAITPSSSSST

SEQ ID NO: 79270 - protein, 92 aa, Zea mays
  Coding DNA Sequence Number=SeqID_37491
  Homolog annotation: Hit_ID=Q2HW33; Match level="QueryCoverage=49%, HitCoverage=13%, E-value=1e-07, Identity=58%"; Hit description =Protein phosphatase 2C-like
MVVANIDDSRVVLDTASDDDAITPSSSSSTLSLTCHPNQESSVLVMSSAFDDYYIEDCGVILVPEVTQRRIDNSDQFIILATVRVAFVSACL

SEQ ID NO: 79271 - protein, 100 aa, Zea mays
  Coding DNA Sequence Number=SeqID_37492
MGRGIDINVCHGRLILARFRCTRLLRGKVGSLLRLLLELVGSSGLAPTRPGVNPFHWSFLPGPRGDDLTDYGALWPFVRFMLRRSAFCTVGFRTSLGAPK

SEQ ID NO: 79272 - protein, 116 aa, Zea mays
  Coding DNA Sequence Number=SeqID_37493
MGRGIDINVCHGRLILARFRCTRLLRGKVGSLLRLLLELVGSSGLAPTRPGVNPFHWSFLPGPRGDDLTDYGALWPFVRFMLRRSAFCTVGFRTSLGAPKVHPMGVAPELRVDFCK

SEQ ID NO: 79273 - protein, 98 aa, Zea mays
  Coding DNA Sequence Number=SeqID_37494
MVEDSSDIIAIVLVYCMANNNIIRFHPTRRNINGLLRSCSYDLLYLRSVRLVLHCQILDTDVEYEVAPFFTIIVRARVTKVCAYKDGNVIIDIAVGCQ

SEQ ID NO: 79274 - protein, 515 aa, Zea mays
  Coding DNA Sequence Number=SeqID_37495
  Homolog annotation: Hit_ID=O80401; Match level="QueryCoverage=21%, HitCoverage=25%, E-value=5e-28, Identity=60%"; Hit description=SAR DNA binding protein
  Pfam annotation: Domain name=Nop; Domain location=34-135; Score= -22.2; E_value=1.1e-05; Accession=PF01798.8; Description=Putative snoRNA binding domain
MRGTPKPAYNFFIWTGQQEGYQHSTSICILVMKVFAECGERALILFAYVVCYNLLSPLRTKGCVSLHALFIALKTKHSTPKYGLVYLASLIGKASQKHKGKISLSLATKTALAIYYDGEDNSITTECQIKFLKVENLGNQLVQQKGKPKIEVYEKDRKKGVGALTTHARDSSDIIAIVLVYCMANNNIIRFHPTRRNINGLLRSKPILDWHENSNDEVAEKCDAITSDIESKLRQIEEDPEGAGTAHLYSVTLKISGVANRAFEPLFERQTIAQVRTVYSFVGESKALNSYYEAIQNTLKLGYKAGMAKGGLNQTVPIRRIACHGHWYLGEAVHREPLQVVDEVASGAQGESFNYKFWLIVAELDGRIDARGAILLKQIARVFAIGLESLLGIAMVSTHGDTAGPSSSQEDLAATMKKCISNRPQDHPFTQQQLPACKTILATQTWNQHGLGGDNVFGSCCPLHNGLVSLMHCSGKGKPWDRLDAGKPCALDHTWKAYDLYIGENDSSSASASSG

SEQ ID NO: 79275 - protein, 360 aa, Zea mays
  Coding DNA Sequence Number=SeqID_37496
  Homolog annotation: Hit_ID=O80401; Match level="QueryCoverage=31%, HitCoverage=25%, E-value=3e-28, Identity=60%"; Hit description=SAR DNA binding protein
  Pfam annotation: Domain name=Nop; Domain location=34-135; Score= -22.2; E_value=1.1e-05; Accession=PF01798.8; Description=Putative snoRNA binding domain
MRGTPKPAYNFFIWTGQQEGYQHSTSICILVMKVFAECGERALILFAYVVCYNLLSPLRTKGCVSLHALFIALKTKHSTPKYGLVYLASLIGKASQKHKGKISLSLATKTALAIYYDGEDNSITTECQIKFLKVENLGNQLVQQKGKPKIEVYEKDRKKGVGALTTHARDSSDIIAIVLVYCMANNNIIRFHPTRRNINGLLRSKPILDWHENSNDEVAEKCDAITSDIESKLRQIEEDPEGAGTAHLYSVTLKISGVANRAFEPLFERQTIAQVRTVYSFVGESKALNSYYEAIQNTLKLGYKAGMAKGGLNQTVPIRRIACHGHWYLGEAVHREPLQVVDEVASGAQGERCHTLETNS

SEQ ID NO: 79276 - protein, 122 aa, Zea mays
  Coding DNA Sequence Number=SeqID_37497
MEEVLPVAASSGRRDTTGGAVIAVGTCARSSLDGTMLTQHVLCAAISNWVSSCNRHLEMRPEVEDNSNRHLGLDLGLFITLGDVFPFSPASNPFSMPDNNNWCTHYHFDGCTVVKEQSIATK

SEQ ID NO: 79277 - protein, 116 aa, Zea mays
  Coding DNA Sequence Number=SeqID_37498
MEEVLPVAASSGRRDTTGGAVIAVGTCARSSLDGTMLTQHVLCAAISNWVSSCNRHLEMRPEVEDNSNRHLGLDLGLFITLGDVFPFSPASNPFSMPGIYLTYIKPAHNPICETRR

SEQ ID NO: 79278 - protein, 157 aa, Zea mays
  Coding DNA Sequence Number=SeqID_37499
MEMVSRPEKRWAGSQCKNHETSLGAYWTERENIAEEHYHELTQFEIAAHRTCCVNIVPSRLDRARVPTAMTAPPVVSRRPLEAATGNTSSMSGSGVDVRGNYASGGADAELLMTTLPLVSGCAPNATVPPQFPTAPAAPSTDIPAAGLHRVPLTPGP

SEQ ID NO: 79279 - protein, 69 aa, Zea mays
  Coding DNA Sequence Number=SeqID_37500
MYEEMPPEHQVKYDKIKALFEADLIDSFERTHNHSIRWKGFSPKGALDEPKYRLPEFTKFNISKYGGIF

SEQ ID NO: 79280 - protein, 214 aa, Zea mays
  Coding DNA Sequence Number=SeqID_37501
MYEEMPPEHQVKYDKIKALFEADLIDSFERTHNHSIRWKGFSPKGALDEVDLSLPSPPLPYSVAAPEAQLAATPTYVMYKMDGCPKDCQFLNEPPNHIPHGFSCMYGPNYAGTTHPIRSSATGVSRADAEKQAWLDQYATHPSHENSALGVATVDQISIIVRDQFGMIPKRRVVSYIKHIPGAENRRRHGARGVPSLLIYQGEPDGMLVLFPVA

SEQ ID NO: 79281 - protein, 1176 aa, Zea mays
  Coding DNA Sequence Number=SeqID_37502
  Gene Ontology: Cellular component=nuclear chromosome; Biological process=chromosome organization and biogenesis (sensu Eukaryota)
  Homolog annotation: Hit_ID=Q016T1; Match level="QueryCoverage=18%, HitCoverage=46%, E-value=5e-36, Identity=39%"; Hit description=[D] KOG1213 Sister chromatid cohesion complex Cohesin
  Pfam annotation: Domain name=Rad21_Rec8; Domain location=1117-1171; Score=57.6; E_value=4e-14; Accession=PF04824.7; Description =Conserved region of Rad21  Rec8 like protein
  Pfam annotation: Domain name=Rad21_Rec8_N; Domain location=1-111; Score=231.0; E_value=2.7e-66; Accession=PF04825.4; Description=N terminus of Rad21  Rec8 like protein
  Pfam module annotation: Pfam domain module=Rad21_Rec8::Rad21_Rec8_N; Domain location=1117-1171::1-111
MFYSQFILAKKGPLGTIWIAAHLERKLRKNQVADTDIGVSVDSIIFPDVPIALRLSSHLMLGVVRIYSRKVNYLFHDCSEALLKIKQAFRSTAVDLPPEESTAPYHSITLPETFDLDDFELPEAAFQGDTDHHVSTKEQITLQDNPEKTGYSTSQFGLDERFGDASSSHIGFDLEEELILNKDHSIHLQSDDGIIIQGRSSVPSTDMDIDDNKSQDIIAEGYHNMDGGHSSHGKLGSLNLNAIDLGGNSIPNWTGYNVHTPDLNDILLHNEGIAGPSASYIQPSPYTCDEPASPEFISAQAPATPGLMEETVPSRVHESPVLSPQRKPSPSTNDETAKTDTPAAPASDFLHSATGNANDVGAERTELGLAKHVQVESSAFWDADASGQQHTSEGLPSQGQADHLEPAADKLVNSDGIAASVETVTVNATIKDVPLAVNDSEPCVDGSTEPSVVENLVQINGPLIDAQDFQHEAQAMQQVVASNDRLNELATSEFAEPEKMLSVPDSEFNHPIDLGLITAEKGTTESDGSNIIGSLASRKRHLEDSLPALESETTERLSSRPHGIRTNDFVPHDDDILASILVGRRTPGFTLDSTPLPPRESSLKRRRLGSKMGTLKRKVQIDDAMVLHADTIRQQLINTEDIRRIRKKAPCTRSEIWMIEKGSLEDDIFHEPIFSCLSEELNKLHNRTYEAIVHPAVQNMELQGQLDMPEAITEDSNIAGFGAATIDGPLHIPDGIQSDAMLPRANDAYGATAAFSLQVPPNNQVNGASNDFVIGTLFQGVTGPFIGNEKEVALADRERAQVNTLYSDHFQDVPSDLHSTDANISSQDVTLDNSGQACAHATDGMTRELTHFVHSNANIFESNEVPASEITGVEYNQGASGFPQSTEDENAVGYNQDVSGFPRPTEDENAVDYNQDASGFSRPTEDVQDASGFPRPTEDENMVDYNQDASGFPRPTEDVNAVGYNQDASGFARPTEDVNAVGCNQDASGFPRSMKDENAVEYNQDGSGFPRPAENENDVSAMGDNSGFHENNMGSLTDLDMVNDYELKESNDFGSAINGVDTDFLNYDDDDGGDFDDANDDEPNPNEFQSLDNSGWSSRTRGVARYLKALFDDESGLERKSVAIDHLVRGKTRKEASRMFFETLVLTTKDYISVDQPNPFDLVRIKPGSKLLMSEF

SEQ ID NO: 79282 - protein, 121 aa, Zea mays
  Coding DNA Sequence Number=SeqID_37503
  Homolog annotation: Hit_ID=Q016T1; Match level="QueryCoverage=30%, HitCoverage=6%, E-value=1e-09, Identity=78%"; Hit description=[D] KOG1213 Sister chromatid cohesion complex Cohesin
  Subcellular localization annotation: CTP_CleavageSite=48; ConfidenceScore=5.70e-01
LAAASASQFSQPTQASKSKQSPAPVTDKFPREYLPPCFFLLPFTPRVRAQSLSPVATLERPLLPLDARSSPCRSGDEHPPGMPLEFILAKKGPLGTIWIAAHLERKLRKNQVADTDIGVSV

SEQ ID NO: 79283 - protein, 139 aa, Zea mays
  Coding DNA Sequence Number=SeqID_37504
  Homolog annotation: Hit_ID=Q016T1; Match level="QueryCoverage=26%, HitCoverage=6%, E-value=1e-09, Identity=78%"; Hit description=[D] KOG1213 Sister chromatid cohesion complex Cohesin
  Subcellular localization annotation: CTP_CleavageSite=66; ConfidenceScore=5.47e-01
MPRSLHHCQFTHRLTARARGAASASQFSQPTQASKSKQSPAPVTDKFPREYLPPCFFLLPFTPRVRAQSLSPVATLERPLLPLDARSSPCRSGDEHPPGMPLEFILAKKGPLGTIWIAAHLERKLRKNQVADTDIGVSV

SEQ ID NO: 79284 - protein, 103 aa, Zea mays
  Coding DNA Sequence Number=SeqID_37505
MQDKGMSIIKDEAKARIVTRKGENATKVKIGKTPFSNQDGKDDFQKVHDKHQDKTCKASKKGEQSMVKVGEALPSNRDRKEEALKGRFKKYKGKYFRLRDKGI

SEQ ID NO: 79285 - protein, 97 aa, Zea mays
  Coding DNA Sequence Number=SeqID_37506
MQDKGMSIIKDEAKARIVTRKGENATKVKIGKTPFSNQDGKDDFSKDKTCKASKKGEQSMVKVGEALPSNRDRKEEALKGRFKKYKGKYFRLRDKGI

SEQ ID NO: 79286 - protein, 101 aa, Zea mays
  Coding DNA Sequence Number=SeqID_37507
MQDKGMSIIKDEAKARIVTRKGENATKVKIGKTPFSNQDGKDDFSKGRHKISIMKRSRDYKCKGDKTCKASKKGEQSMVKVGEALPSNRDRKEEALKGRFK

SEQ ID NO: 79287 - protein, 43 aa, Zea mays
  Coding DNA Sequence Number=SeqID_37508
MALGGIGTNSSIKAKGVTSVESTIGTKATAYHSTPPKGRGAYV

SEQ ID NO: 79288 - protein, 43 aa, Zea mays
  Coding DNA Sequence Number=SeqID_37509
MALGGIETNSSIKAKGVTSVESTIGTKATAYHPTPPKGRGAYV

SEQ ID NO: 79289 - protein, 66 aa, Zea mays
  Coding DNA Sequence Number=SeqID_37510
MALGGIGTNSSIKAKGVTSVESTIGTKATAYHPTPPKGRGAYVWSQNERRTVRACGPDGPRKRRTD

SEQ ID NO: 79290 - protein, 76 aa, Zea mays
  Coding DNA Sequence Number=SeqID_37511
MCFLADFHKPGYGLHVRTVKVTNVSLSATVQDIKEFFSLLGDINHVEMQRYSLERIFNTLRSGSRKTQVSDVVVGF

SEQ ID NO: 79291 - protein, 64 aa, Zea mays
  Coding DNA Sequence Number=SeqID_37512
MAESSDNNHLNIKLEKKRPYSLERIFNTLRSGSRKTQVGNIRKYVEQNERSCRYPQFFVIIVLE

SEQ ID NO: 79292 - protein, 118 aa, Zea mays
  Coding DNA Sequence Number=SeqID_37513
  Homolog annotation: Hit_ID=Q67TQ6; Match level="QueryCoverage=71%, HitCoverage=14%, E-value=3e-10, Identity=42%"; Hit description =Remorin protein-like
MRIQPEDKLNVQFIDKSISNLIVNLSVDEKENGLEEKTLADDYEYIHAWIEGEEAKMTVWENMHKAEAAIQKLVIKLEKKRPYSLERIFNTLRSGSRKTQVQTSISPPGRDPVWEERS

SEQ ID NO: 79293 - protein, 233 aa, Zea mays
  Coding DNA Sequence Number=SeqID_37514
  Homolog annotation: Hit_ID=Q5Z6G3; Match level="QueryCoverage=28%, HitCoverage=14%, E-value=3e-12, Identity=58%"; Hit description =Putative RNA polymerase I, II and III 16.5 kDa subunit
  Pfam annotation: Domain name=RNA_pol_Rpb8; Domain location=89-212; Score=-12.3; E_value=5.8e-06; Accession=PF03870.5; Description=RNA polymerase Rpb8
  Subcellular localization annotation: CTP_CleavageSite=55; ConfidenceScore=5.12e-01
MRRLLVPSSTPRALPLPRPIPSCPDSGSDQGAGSVDAQTQAASSARVLASRQHPRLQHVWNLSCLQRNISLRIQPEDKLNVQFIDKSISNLIVNLSVDEKENVTQIEMCMQLDVATEVYSMRVGDTFNMVLALTLNLDGSSDTGYYTQIHYYEKYFNSLEEKTLADDYEYIHAWIEGEEAKMTVWENMHKAEAAIQKLVIKLEKKRPYSLERIFNTLRSGSRKTQVSDVVVGF

SEQ ID NO: 79294 - protein, 233 aa, Zea mays
  Coding DNA Sequence Number=SeqID_37515
  Homolog annotation: Hit_ID=Q5Z6G3; Match level="QueryCoverage=28%, HitCoverage=14%, E-value=3e-12, Identity=58%"; Hit description =Putative RNA polymerase I, II and III 16.5 kDa subunit
  Pfam annotation: Domain name=RNA_pol_Rpb8; Domain location=89-206; Score=-9.9; E_value=3.3e-06; Accession=PF03870.5; Description=RNA polymerase Rpb8
  Subcellular localization annotation: CTP_CleavageSite=55; ConfidenceScore=5.12e-01
MRRLLVPSSTPRALPLPRPIPSCPDSGSDQGAGSVDAQTQAASSARVLASRQHPRLQHVWNLSCLQRNISLRIQPEDKLNVQFIAKSISNLIVNLSVDEKENVTQIEMCMQLDVATEVYSMRVGDTFNMVLALTLNLDGSSDTGYYTQIHYYEKYFNSLEEKTLADDYEYIHAWIEGEEAKMTVWENMQKAEAAIQKLVIKLEKKRPYSLERIFNTLRSGSRKTQVSDVVVGF

SEQ ID NO: 79295 - protein, 686 aa, Zea mays
  Coding DNA Sequence Number=SeqID_37516
  Homolog annotation: Hit_ID=Q8LBL6; Match level="QueryCoverage=23%, HitCoverage=26%, E-value=1e-65, Identity=77%"; Hit description=Cell division protein FtsH-like protein
  Pfam annotation: Domain name=AAA; Domain location=499-673; Score =156.3; E_value=7.9e-44; Accession=PF00004.19; Description=ATPase family associated with various cellular activities (AAA)
  Pfam annotation: Domain name=PPR; Domain location=190-224; Score =10.2; E_value=0.46; Accession=PF01535.11; Description=PPR repeat
  Pfam annotation: Domain name=PPR; Domain location=227-261; Score =15.0; E_value=0.12; Accession=PF01535.11; Description=PPR repeat
  Pfam annotation: Domain name=PPR; Domain location=263-297; Score =29.1; E_value=1.5e-05; Accession=PF01535.11; Description=PPR repeat
  Pfam annotation: Domain name=PPR; Domain location=298-332; Score =20.8; E_value=0.0049; Accession=PF01535.11; Description=PPR repeat
  Pfam annotation: Domain name=PPR; Domain location=333-367; Score=7.7; E_value=0.91; Accession=PF01535.11; Description=PPR repeat
  Pfam module annotation: Pfam domain module=AAA::PPR::PPR::PPR::PPR::PP R; Domain location=499-673::190-224::227-261::263-297::298-332::333 -367
MAEAAQRDEARWELVMKKLSCLVQKMESLVGGQADLAAAVAQQAAEDLPVLPQFVRSAGNTTTPVFDEGPVFDDELPIDFGSQGKTASMAAASAMEVPGSTPTPSVPFYDSVDIFHLNSEPVYDVYDDDEDGDSSQQAVVLAADKNYYPTAEEMYGPGMEALVMDEVEQPLEQPIVADALALLEEMRGKGYHADVMRALCKLRDADRTVQVLGEMMEVGFRPWVLTLTYNFVVAVLVKAGRMEEALKVKDQMLLVAGKKMDVVLATTLMHGYCLLGEVGKALDLFNEAVRDGVTATNVTYAVLIKGCDAEGMTDKAYELCRQMIEQGLLSSTHGFNLVITGLLRDKRWEDAISLLEVMVDIPSAGTAAKCEELDIMTECVAQCNLVTAVSSDFHPEFICLFVKKFGGSVAVSSKRVLFLSWGYMEEYEVLIPFQFLQVRESQVNDVCQDMGVGDKCLAAIHDFGDVQGVDEAKEELVEIVSCLHGSLNSKKLGAKLPWGVLLVGPPGTGNTLLAWAVAGEAGIPFFYVSASEFVEAFVGRGLARVRELFKEAKEAAPSIIFIDELDVMGGNRGRSSNDVRDQTLNQLIAEMDGFDSDMKVIVMAATNRPKALDVALCRPGHFSKKVQSWRLGPFTLGVSGLQLGPYMRRQWDPGITNGQLVMSCEELALQIAVLLGDKQHFVGAIM

SEQ ID NO: 79296 - protein, 73 aa, Zea mays
  Coding DNA Sequence Number=SeqID_37517
  Gene Ontology: Mol. function=protein domain specific binding; Cellular component=postsynaptic membrane
  Homolog annotation: Hit_ID=Q6YZ89; Match level="QueryCoverage=77%, HitCoverage=46%, E-value=1e-16, Identity=78%"; Hit description =Putative postsynaptic protein CRIPT
MVCAKCKIAPPFLPVVDGEKKLGKVIVPDKWKEGASNTNESGGRKINENKLLSKKNRSDSLSQPLPSLLPYYC

SEQ ID NO: 79297 - protein, 801 aa, Zea mays
  Coding DNA Sequence Number=SeqID_37518
  Homolog annotation: Hit_ID=Q8LBL6; Match level="QueryCoverage=20%, HitCoverage=26%, E-value=1e-65, Identity=77%"; Hit description=Cell division protein FtsH-like protein
  Pfam annotation: Domain name=AAA; Domain location=557-731; Score =156.3; E_value=7.9e-44; Accession=PF00004.19; Description=ATPase family associated with various cellular activities (AAA)
  Pfam annotation: Domain name=PPR; Domain location=248-282; Score =10.2; E_value=0.46; Accession=PF01535.11; Description=PPR repeat
  Pfam annotation: Domain name=PPR; Domain location=285-319; Score =15.0; E_value=0.12; Accession=PF01535.11; Description=PPR repeat
  Pfam annotation: Domain name=PPR; Domain location=321-355; Score =29.1; E_value=1.5e-05; Accession=PF01535.11; Description=PPR repeat
  Pfam annotation: Domain name=PPR; Domain location=356-390; Score =20.8; E_value=0.0049; Accession=PF01535.11; Description=PPR repeat
  Pfam annotation: Domain name=PPR; Domain location=391-425; Score=7.7; E_value=0.91; Accession=PF01535.11; Description=PPR repeat
  Pfam module annotation: Pfam domain module=AAA::PPR::PPR::PPR::PPR::PP R; Domain location=557-731::248-282::285-319::321-355::356-390::391 -425
MGLDVAWPNSEQPKGRTTTAGELLTSWLTIGGYGDVTVGIRGSRFSTFSSVSSLVLATMAEAAQRDEARWELVMKKLSCLVQKMESLVGGQADLAAAVAQQAAEDLPVLPQFVRSAGNTTTPVFDEGPVFDDELPIDFGSQGKTASMAAASAMEVPGSTPTPSVPFYDSVDIFHLNSEPVYDVYDDDEDGDSSQQAVVLAADKNYYPTAEEMYGPGMEALVMDEVEQPLEQPIVADALALLEEMRGKGYHADVMRALCKLRDADRTVQVLGEMMEVGFRPWVLTLTYNFVVAVLVKAGRMEEALKVKDQMLLVAGKKMDVVLATTLMHGYCLLGEVGKALDLFNEAVRDGVTATNVTYAVLIKGCDAEGMTDKAYELCRQMIEQGLLSSTHGFNLVITGLLRDKRWEDAISLLEVMVDIPSAGTAAKCEELDIMTECVAQCNLVTAVSSDFHPEFICLFVKKFGGSVAVSSKRVLFLSWGYMEEYEVLIPFQFLQVRESQVNDVCQDMGVGDKCLAAIHDFGDVQGVDEAKEELVEIVSCLHGSLNSKKLGAKLPWGVLLVGPPGTGNTLLAWAVAGEAGIPFFYVSASEFVEAFVGRGLARVRELFKEAKEAAPSIIFIDELDVMGGNRGRSSNDVRDQTLNQLIAEMDGFDSDMKVIVMAATNRPKALDVALCRPGHFSKKVQSWRLGPFTLGVSGLQLGPYMRRQWDPGITNGQLVMSCEELALQIAVLLGDKQHFVGAIMKVIVPDKWKEGASNTNESGGRKINENKLLSKKNSRCRLPSLLPCVTSPWPPSTRNGA

SEQ ID NO: 79298 - protein, 273 aa, Zea mays
  Coding DNA Sequence Number=SeqID_37519
MKGHKYFQCKAITGDKQKEKLKQKPTSKISNTYINKVDKKAATPYLIKKKKNGKVIAIKANKQANKGKGAKRIWVPKEIISTMKSTKKWRGRYDAKVEHLAVGEVNLAALAGTDAPKQEKKHVIIIISALLGASLLLVVAPWLLHADTLCDLEVATSPGSDNKHLEVEARLHHVDVGATTISHGRRVQHHTNHRQHAHVIAIKSKSVKEKAATDEESTGEATPLHACTRPRQRLQTGPYVAAEYSTTPPICTHGPSKPEWPTTGANDGRWTKF

SEQ ID NO: 79299 - protein, 296 aa, Zea mays
  Coding DNA Sequence Number=SeqID_37520
  Pfam annotation: Domain name=zf-CCHC; Domain location=249-266; Score =19.3; E_value=0.00065; Accession=PF00098.13; Description=Zinc knuckle
  Pfam annotation: Domain name=zf-CCHC; Domain location=50-67; Score =15.7; E_value=0.0026; Accession=PF00098.13; Description=Zinc knuckle
  Pfam module annotation: Pfam domain module=zf-CCHC::zf-CCHC; Domain location=249-266::50-67
MEQDHLFTPSKCSQDDQASISSFEDDETVRHIEKVEDLLFNINKKTQRNIGYFACGEKGHFRDNCANTTEPKKRRSKGKKLTSVKTWDDSSIEDEPPRSCNHRSSSRSSRSSHKFLTVRASSQDAIENLLEKMEFLRIYNNELTIKLESTGGTPKASLVEIPEIIKKDASTSCLDLIDINSNPCNQVLVKNVIVDTCSNEIAMENELLKKEVARLDKAFYDKKDKAKQTQPLHDNATVGVNKTMEGETVVCWLCHKEGHKSYQCNAKTEGEKKKKPTSKISNTYTNKVDQKVATPY

SEQ ID NO: 79300 - protein, 333 aa, Zea mays
  Coding DNA Sequence Number=SeqID_37521
  Pfam annotation: Domain name=zf-CCHC; Domain location=286-303; Score =19.3; E_value=0.00065; Accession=PF00098.13; Description=Zinc knuckle
  Pfam annotation: Domain name=zf-CCHC; Domain location=87-104; Score =15.7; E_value=0.0026; Accession=PF00098.13; Description=Zinc knuckle
  Pfam module annotation: Pfam domain module=zf-CCHC::zf-CCHC; Domain location=286-303::87-104
MDLVWCPSVYGKASIRSQTGGAQTRSGGALDRSGGHHNVQDHLFTPSKCSQDDQASISSFEDDETVRHIEKVEDLLFNINKKTQRNIGYFACGEKGHFRDNCANTTEPKKRRSKGKKLTSVKTWDDSSIEDEPPRSCNHRSSSRSSRSSHKFLTVRASSQDAIENLLEKMEFLRIYNNELTIKLESTGGTPKASLVEIPEIIKKDASTSCLDLIDINSNPCNQVLVKNVIVDTCSNEIAMENELLKKEVARLDKAFYDKKDKAKQTQPLHDNATVGVNKTMEGETVVCWLCHKEGHKSYQCNAKTEGEKKKKPTSKISNTYTNKVDQKVATPY

SEQ ID NO: 79301 - protein, 53 aa, Zea mays
  Coding DNA Sequence Number=SeqID_37522
MAGGIGLAGAKERGLAGEVLSFEKQRTQLIFGKRSEFQKFRNLNFSKGSWFKG

SEQ ID NO: 79302 - protein, 53 aa, Zea mays
  Coding DNA Sequence Number=SeqID_37523
MAGGIELAGAKERGLAGEVLSFEKQRTQLIFGKRSEFQKFRSLNFSKGLWFKG

SEQ ID NO: 79303 - protein, 53 aa, Zea mays
  Coding DNA Sequence Number=SeqID_37524
MAGGIELAGAKERGLAGEVLSFEKQRTQLIFGKRSEFQKFRNLNFSKGSWFKG

SEQ ID NO: 79304 - protein, 53 aa, Zea mays
  Coding DNA Sequence Number=SeqID_37525
MAGGIELARAKERGLAGEVLSFEKQRTQLIFGKRSEFQKFRNLNFSKGSWFKG

SEQ ID NO: 79305 - protein, 127 aa, Zea mays
  Coding DNA Sequence Number=SeqID_37526
MGARNWAETHRLALSTCGGGRPKSGEVDLGPPVKSGLVRGLGKLHGPLVELAEALARLGGGWSGLATVTEALAAMAGGIELAGTKEKGLAGEVLSFEKQRTQLIFGKRSEFQKFKNLNFSKGSWFKG

SEQ ID NO: 79306 - protein, 278 aa, Zea mays
  Coding DNA Sequence Number=SeqID_37527
  Pfam annotation: Domain name=zf-CCHC; Domain location=144-161; Score =25.5; E_value=6.2e-05; Accession=PF00098.13; Description=Zinc knuckle
MAAALLLHLPSAVNFALLLHLPTAINPGTHMLCTRLCPWETGVTEVISTNKSETTKQKNRILFSGIKSQWSSQEQLIEDALSDDELPGFPKRKHHKDAQLQKEAHECYIDGWTITCTQFQPRRRIRSKKQKWKHGKSQEITSRKACYLCGREDHYLRNCPEKSSLPNTPGIKLSQSSDVKYEQKCTKTSINIVKNNKRNRKIFGYMSSPPQPQAKAPKNMDTQTEESSQTQLCEIQTLNHFSPPVGQAKLTAKNSKQEVLASTARMKNILFANAPRSV

SEQ ID NO: 79307 - protein, 71 aa, Zea mays
  Coding DNA Sequence Number=SeqID_37528
  Pfam annotation: Domain name=zf-CCHC; Domain location=10-27; Score =24.8; E_value=8e-05; Accession=PF00098.13; Description=Zinc knuckle
MTRKELKARGACYYCKNEEHIIRECPKKRLDRLEKKVVKQDPNNNPEDQPVITFPNLEDDILFKRGRFVTL

SEQ ID NO: 79308 - protein, 155 aa, Zea mays
  Coding DNA Sequence Number=SeqID_37529
  Subcellular localization annotation: CTP_CleavageSite=39; ConfidenceScore=5.04e-01
INVVEGVSTVQGRDSGFGVEQGTTRSSCCVQRSFDGVPRMANDVQMRGRGVFGAGRSAPALGARGFGRSWGAGLGGFMGRALSRLEAGSCLGGKRRADGQGKGQGATPASREIREEREKLGGGGWEPREAGRAAPMGVTKSTPLKKNLVLEIREG

SEQ ID NO: 79309 - protein, 193 aa, Zea mays
  Coding DNA Sequence Number=SeqID_37530
  Homolog annotation: Hit_ID=Q8LML8; Match level="QueryCoverage=46%, HitCoverage=5%, E-value=5e-20, Identity=52%"; Hit description =Putative DNA helicase homolog
MVISELSAIPFVPAPSQPEDVEEDKITQSPRRKRHKRHVSSGAKQNLVSRQNQKFQSTIGGNFATATRDREMDTNENNEIDHPTVSEIDNNDNHDEDILFEADDDEEEGYLFAYQDGESGEDINIDDTQDAFAVTPDVPDPYDKVYSNIPKETHLLNVVADCDYCKAKKFQYEPPGFCCRNGQIDLAPFETPS

SEQ ID NO: 79310 - protein, 1169 aa, Zea mays
  Coding DNA Sequence Number=SeqID_37531
  Gene Ontology: Mol. function=helicase activity; Biological process =viral genome replication
  Homolog annotation: Hit_ID=Q9AYF0; Match level="QueryCoverage=88%, HitCoverage=85%, E-value=0.0, Identity=46%"; Hit description =Helicase-like protein
  Pfam annotation: Domain name=DUF889; Domain location=902-1072; Score =249.0; E_value=9.9e-72; Accession=PF05970.5; Description=Eukaryotic protein of unknown function (DUF889)
MTEGADVGMQHQTTLNVTTNDNHDEDILFEADDDEEEGYLFAYQDGESGEDINIDDTQDAFAVTPDVPDPYDKVYSNIPKETHLLNAVADCDYCKAKKFQYEPPGFCCRNGHIDLAPFETPSQLRRLWECADADARHFRDNIRFFNGHFSFTSLYCCLDSMTTNMDCGIYTFRAHGMMYHNLRSFGREVGTEHKHLELYFYDDDPSLEHRYRKCRQEQLEKDKAVIKQLVEILKGNPYSEHLRSMGHVDNIEDYHIALNLDQTLNQKLYNVPITSEVAAVWIEGSELGWHANIPKSNVSMDEVDAYRDQHRRSDANNDDTKRPSHLCVSVRDYYCYRFQIRPSIFNPILHGKRLFQQFAVDTYIKIESSRLDFIRKNQDRLRADLYKGLVDSLHEGENRADKIGKRTVLSTSFIGGPRDMRRRYMDAMALVRKFGKPDIFLTMTCNPNWDEITRELLPMQSPQDHPNLVVRIFRAKLEELKKRLTKHDILGKIRAYVYVVEFQKRGLPHVHFLLIMQRKYKLTCPDQYDLLISAEIPDKKKRRDDGRKETVRGCELDNRWVVPYNPYLLRLFNCHINVEACGSIEAVKYLFKYIYKGHDRASVAVTDANKADGDVDEIKQYRDARSMLTAYFEANRLHEVARGILYRDFLSDEGERFFLRLLLNHVMGATSYADLRTVDGDTLPSFREAAQMRGLLEAGDTIDECLNEAAIYQMSSALRRLFATILVYCEPNDVAELWQRHLDSMSEDYHRSTQSKTHVQQMVLIDIRNILQSMGKDIKTFPLLAIIDKYDDSHGTDREIYEEESIEPIAEDVAMKETLNEEQRSAYDKILSVVDTNNGGVFFVDGPGGTGKTYLYKALLAALRNQDKIAVATATSGVAASILPGGGLPIHASRYHLLLMMVLQVLPVVCKGSRAQIVAASLRSSYLWESMCHLKLVQNMRAQSDPWFAEYLLRVGGGTEEANNDGDVRLPDEMMYHSFDTAVDDPNNYYPSEFLNTLTPNGLPPHVLKLKVGCPIMLLRNIDPANGLCNGTRLVVRGFQKNSIDAEIVLGQHAGMRIFLPRIPLCPSDDEMFPFQFKRKQFPIRLSFAMTVNKAQGQTIPNVGVYLPEPVFSHGQLYVALSRVTARSKVKILAIPVHDEKKKKGVERNSAINGATYTKNIVYKEVLTP

SEQ ID NO: 79311 - protein, 114 aa, Zea mays
  Coding DNA Sequence Number=SeqID_37532
AGSGDSSVAAMARRWPGAAVADLRGCTGNGGEGEVEEGSAGAQMGEGERASGARGSSGQGRGGCELHARRGRGEGGRAQLGRQLREDDGADKPVPRAEREGKAGAGARKAAALT

SEQ ID NO: 79312 - protein, 124 aa, Zea mays
  Coding DNA Sequence Number=SeqID_37533
MARRWPGAAVADLRGCTGNGGEGEVEEGSAGAQMGEGGEGEWGSGLKWPGAGGCELHARRGRGEGGRAQLGRQLREDDGADKPGPRAEREGKAGAGTRKAAALTGGPARAERAGGGGGGRRARP

SEQ ID NO: 79313 - protein, 91 aa, Zea mays
  Coding DNA Sequence Number=SeqID_37534
  Gene Ontology: Mol. function=transporter activity; Cellular component= membrane; Biological process=transport
  Homolog annotation: Hit_ID=Q5VQL3; Match level="QueryCoverage=56%, HitCoverage=13%, E-value=3e-12, Identity=65%"; Hit description =Putative glucose-6-phosphate/phosphate-translocator
MTLSPITLQSTGNPMSVKEFTQSNIVYLILILGENRIGFWSAMTSNLMNQSRNVYNKKILADKEDSLDDINLFSIITVMAFLLFRTPTMTI

SEQ ID NO: 79314 - protein, 396 aa, Zea mays
  Coding DNA Sequence Number=SeqID_37535
  Homolog annotation: Hit_ID=Q5VQL3; Match level="QueryCoverage=33%, HitCoverage=31%, E-value=5e-37, Identity=62%"; Hit description =Putative glucose-6-phosphate/phosphate-translocator
  Pfam annotation: Domain name=TPT; Domain location=266-383; Score=6.2; E_value=0.00024; Accession=PF03151.7; Description=Triose-phosphate Transporter family
  Pfam annotation: Domain name=Tubulin; Domain location=1-131; Score= -82.0; E_value=0.042; Accession=PF00091.15; Description=TubulinFtsZ family, GTPase domain
  Pfam module annotation: Pfam domain module=TPT::Tubulin; Domain location=266-383::1-131
GKVIVDLCLDRVRKLAYNCTGLQGFLVFNAVGGGTGSVLGSLLLERLSVDYGKKSKLGFTIYPSPQELNLVGNKISEVDGLHRLLKIKVLDLCHIQFFYSHYTWGAEDARKILNNYGTCPILSMEMIWCSGPMSKKWTTLGYCHHLHAPLATQGGSPIQAESHPRPKSSLQSTATSHLHQDQEAHAAEVGPTTALFKAKVPWSSQIGNLSEKQRVFKTVKGWTPSLPVLGSLVPIVGGVVLASMTEVSFNCNIVYLILILGENRIGFWSAMTSNLMNQSRNVYSKKILADKEDSLDDINLFSIISVMTFLLSAPLMLCVEGIKFSPPYLQNAGVNVKELFVRAALAGTSFYFYQQEWPVCVTYGAVAGYLFGMAVSLVLSPNSCSQEKGLCKNCLA

SEQ ID NO: 79315 - protein, 73 aa, Zea mays
  Coding DNA Sequence Number=SeqID_37536
  Gene Ontology: Mol. function=structural molecule activity; Cellular component=protein complex; Biological process=microtubule-based movement
  Homolog annotation: Hit_ID=Q53M52; Match level="QueryCoverage=88%, HitCoverage=14%, E-value=5e-20, Identity=72%"; Hit description =Tubulin alpha-2 chain
GKVIVDLCLDRVRKLADNCTGLQGFLVFNVVGGGTGSVLGSLLLERLSVDYGKKSKLGFTIYPSPQDWPHVPL

SEQ ID NO: 79316 - protein, 144 aa, Zea mays
  Coding DNA Sequence Number=SeqID_37537
  Gene Ontology: Mol. function=structural molecule activity; Cellular component=protein complex; Biological process=microtubule-based movement
  Homolog annotation: Hit_ID=Q53M52; Match level="QueryCoverage=45%, HitCoverage=14%, E-value=5e-20, Identity=72%"; Hit description =Tubulin alpha-2 chain
  Pfam annotation: Domain name=Tubulin; Domain location=1-133; Score= -79.2; E_value=0.026; Accession=PF00091.15; Description=TubulinFtsZ family, GTPase domain
GKVIVDLCLDRVRKLADNCTGLQGFLVFNVVGGGTGSVLGSLLLERLSVDYGKKSKLGFTIYPSPQELYLVGNKISEVDGLHRLLKLKVLDLCHIQFFYSHYTWGAVDARKILNNYGTCPILSMVYCALIFLGIIVSVKYFAHG

SEQ ID NO: 79317 - protein, 275 aa, Zea mays
  Coding DNA Sequence Number=SeqID_37538
  Gene Ontology: Mol. function=structural molecule activity; Cellular component=protein complex; Biological process=microtubule-based movement
  Homolog annotation: Hit_ID=P14641; Match level="QueryCoverage=64%, HitCoverage=40%, E-value=5e-56, Identity=62%"; Hit description =Tubulin alpha-2 chain
  Pfam annotation: Domain name=Tubulin; Domain location=107-275; Score =133.5; E_value=5.7e-37; Accession=PF00091.15; Description =TubulinFtsZ family, GTPase domain
  Subcellular localization annotation: CTP_CleavageSite=59; ConfidenceScore=5.56e-01
MALSVSSLAVALSHLSLPSTSTPKPHLAPLLRLRSTYCRRRSHRSLRGGPAHGGGDGCRGGGRGGCPVGNRAAKVCEASTAGQEVEADVAFLFSLSDTSVGVAHDAFNTFFSETGSGKHVPRAIFVDLEPTVINEVRTGSYRQLFHPEQLISGKEDAANNFARGHYTVGMVIVDLCMDRVRKLADNCTGLQGFLVFNAVGGGTGSGLGSLLLERLSVDYGRKSKLGFTIYPSPQHYATLFYQALLFTGFMLSLLASIIVKEKVLANISNVRALDV

SEQ ID NO: 79318 - protein, 161 aa, Zea mays
  Coding DNA Sequence Number=SeqID_37539
MKRASLFEGVKDSTETNRKNKTWFKTKEQKEIEVLPGLAHRTVRCGTGQCPVHQGGLPSNSSPSVFSGADHYNSPDCPVHHRTVSGAPERSGFKLASFGKSEGRSAKIHRIVRCTPDCPVRQRSNGYLAPTVDSDSEQCATVHAAEVRAENQRGTGLSGAT

SEQ ID NO: 79319 - protein, 347 aa, Zea mays
  Coding DNA Sequence Number=SeqID_37540
  Homolog annotation: Hit_ID=Q2HW33; Match level="QueryCoverage=19%, HitCoverage=19%, E-value=3e-14, Identity=56%"; Hit description =Protein phosphatase 2C-like
ADHYNSPDCPVHHRTVSGAPERSGFKLASFGKSEGRSAKIHRIVRCTPDCPVRQRSNGYLAPTVDSDSEQCATVHAAEVRAENQRGTGLSGVHRTVRCHMRTKPPTVDQLQPQQETPLVTHHAYRAIPESRVLRLSKRPEPVENRLSLSLVLIARTIEPQSTTPSYPKAPQGDLWVCGRTLDTDRGLLSCVVTRARWSGRPVADGSDDAHDEDCGAWVVVYLEGADGRAWSAGAGMYLDGSVMEGRGVGVRTAEAIITEVRENGVCPSVESECRGEVYYLTDEPGVHFVWQTSQESSVLAMSRAFDDYSIKDCGVISAPEVMQRRTDNNGKFVILVTVGVAFVLICL

SEQ ID NO: 79320 - protein, 97 aa, Zea mays
  Coding DNA Sequence Number=SeqID_37541
  Homolog annotation: Hit_ID=Q2HW33; Match level="QueryCoverage=48%, HitCoverage=13%, E-value=9e-07, Identity=56%"; Hit description =Protein phosphatase 2C-like
MYLDGSVMEGRGVGVRTAEAIITEVRENGVCPSVESECRGETSQESSVLAMSRAFDDYSIKDCGVISAPEVMQRRTDNNGKFVILVTVGVAFVLICL

SEQ ID NO: 79321 - protein, 94 aa, Zea mays
  Coding DNA Sequence Number=SeqID_37542
  Subcellular localization annotation: CTP_CleavageSite=17; ConfidenceScore=5.31e-01
MACMPAVSAPSVLAPAPASTRTHLCYSTEMRRGALSLRPARAIPTLRLGGHRDARGAVVVRATAAEVFVATGTYGAPRGQARCDRLPGCFAAGA

SEQ ID NO: 79322 - protein, 167 aa, Zea mays
  Coding DNA Sequence Number=SeqID_37543
  Gene Ontology: Mol. function=peptidyl-prolyl cis-trans isomerase activity; Biological process=protein folding
  Homolog annotation: Hit_ID=Q9AQU0; Match level="QueryCoverage=44%, HitCoverage=32%, E-value=3e-36, Identity=95%"; Hit description =Putative peptidyl-prolyl cis-trans isomerase, chloroplast
  Pfam annotation: Domain name=Pro_isomerase; Domain location=78-167; Score=61.6; E_value=2.6e-15; Accession=PF00160.11; Description =Cyclophilin type peptidyl-prolyl cis-tr
  Subcellular localization annotation: CTP_CleavageSite=17; ConfidenceScore=5.31e-01
MACMPAVSAPSVLAPAPASTRTHLCYSTEMRRGALSLRPARAIPTLRLGGHRDARGAVVVRATAAEGAVELQAKVTSKCFFDVEVGGEPAGRIVIGLFGEVVPKTVDNFRALCTGEKGYGYKGCSFHRIIKDFMIQGGDFQQNNILLNIPTTEEDVSRIEVPIHHST

SEQ ID NO: 79323 - protein, 94 aa, Zea mays
  Coding DNA Sequence Number=SeqID_37544
  Gene Ontology: Mol. function=peptidyl-prolyl cis-trans isomerase activity; Cellular component=chloroplast; Biological process=protein folding
  Homolog annotation: Hit_ID=Q9AQU0; Match level="QueryCoverage=79%, HitCoverage=32%, E-value=1e-38, Identity=94%"; Hit description =Putative peptidyl-prolyl cis-trans isomerase, chloroplast
  Pfam annotation: Domain name=Pro_isomerase; Domain location=1-93; Score=96.3; E_value=9.3e-26; Accession=PF00160.11; Description =Cyclophilin type peptidyl-prolyl cis-tr
EKGYGYKGCSFHRIIKDFMIQGGDFQQNNGTGGRSIYGECFDDENFTLKHVGPGVLSMANAGPNTNGSQFFICTVKRNALGEFEPEVPRSLLLR

SEQ ID NO: 79324 - protein, 106 aa, Zea mays
  Coding DNA Sequence Number=SeqID_37545
  Gene Ontology: Mol. function=protein serine/threonine kinase activity; Biological process=protein amino acid phosphorylation
  Homolog annotation: Hit_ID=Q40734; Match level="QueryCoverage=69%, HitCoverage=24%, E-value=1e-14, Identity=56%"; Hit description =Protein cdc2 kinase
MDRVIVVMVVASIEEAKPPNFQSHARKYTPERRQKFIRGQRSNHEKIHTATMKILMYQLCNNVVFVHDPKVLHRELKLHILLKDHKTMVLKIADLSLSHAIRFMEI

SEQ ID NO: 79325 - protein, 211 aa, Zea mays
  Coding DNA Sequence Number=SeqID_37546
MAVVGQQVSGRHVCMCGFPVCACTRGRHGPCDRGHGRGLHRGPVDRRLVEALCDGDSDSHPKPSTATATKTKTLALCNSVVFVHDPKVLHRELKLHILLKDHKTMVLKIADLSLSHAIRSLTFAMLSRSSFSLAGPPCYRQHRRRRGRAAGSAPACASPLSHSTHTGSAIREGCVEATSAMICYATGCSPTRCSSSKLAPRLVRLINIKHL

SEQ ID NO: 79326 - protein, 76 aa, Zea mays
  Coding DNA Sequence Number=SeqID_37547
  Homolog annotation: Hit_ID=Q94GH3; Match level="QueryCoverage=53%, HitCoverage=12%, E-value=3e-10, Identity=75%"; Hit description =Putative cell differentiation protein
MPFVNALVALYLYPFLNTVYKTREYEFLRLTSLGVIGALVKSYMVVPQGLRILNHEMDDDRVECLSHHLKKVVLKG

SEQ ID NO: 79327 - protein, 137 aa, Zea mays
  Coding DNA Sequence Number=SeqID_37548
  Homolog annotation: Hit_ID=Q94GH3; Match level="QueryCoverage=29%, HitCoverage=12%, E-value=2e-09, Identity=73%"; Hit description =Putative cell differentiation protein
MPFVNALVALYLYPFLNTVYKTREYEFLRLTSLGVIDALVKPVVRKCTEMLSRAICISGGDFYVRRFHKDGPIVWRLLALSPFRRLSKMDEKAIILPYRDTSLNSEEPMAEISSQKIQIAVLDMIAAYLRTREMLLH

SEQ ID NO: 79328 - protein, 577 aa, Zea mays
  Coding DNA Sequence Number=SeqID_37549
  Homolog annotation: Hit_ID=Q10716; Match level="QueryCoverage=8%, HitCoverage=11%, E-value=3e-12, Identity=84%"; Hit description =Cysteine proteinase 1 precursor
  Subcellular localization annotation: CTP_CleavageSite=36; ConfidenceScore=5.17e-01
MASQTTLTGGTTPSLGPSRTRSFSAESGFVWILLVVQRIGSAGGCALPHNCCLAVVGLQVLKGNLFVRFSNWMLADPLFLFKVGTEVGAVEPSPKSVAERSPMPEPQCFLAASATHTLLHRRGSNGFTHTLVALYLYPFLNTVYKTREYEFLRLTSLGVIGALVKPRPAPKLPPRAPSRPPPRALKSRQPLPAVIHCCKSAAINDHLPSTPCLPRAPVREPACPVPPCEPRPAGISKRPRLPKRTRAGATRERSGRKHNSTSSSRPPRTSRALAQSPPPAPLPLPTALQLQSRRHRPVSENQRAAGLKLRVASPSAPVRSWAAVAAGRRSTAYLPRLPSVPGNESIPSLCVWIDDDVVAAVLRPVPIPRDLPSPLRSKANLSLNPFLLGSVGSLVVHVEGGQLAVVPTIWGASTLHVFVFQRRFRVCDRGSGVLIGDGGRRSTDNEIIPGGSEEPKPKAFTMPQPTPRAVPPSRHHRPTMRAAYIPPSLAFPKRRPCTKMLNAYSLFEVRVSGDGNCQLKECNSLYEGYIPIKYKHYCKKMKKYGEWGDHVTLQAAADKRLRISSPSTPALGTINKE

SEQ ID NO: 79329 - protein, 147 aa, Zea mays
  Coding DNA Sequence Number=SeqID_37550
  Homolog annotation: Hit_ID=Q10BI2; Match level="QueryCoverage=45%, HitCoverage=35%, E-value=1e-14, Identity=57%"; Hit description =Expressed protein
  Pfam annotation: Domain name=L51_S25_CI-B8; Domain location=89-142; Score=6.3; E_value=0.025; Accession=PF05047.6; Description =Mitochondrial ribosomal protein L51  S25  CI-B8 domain
MQAIPLPGNLRSIVRGDSSRRWDLVFSVVKPSVIQLRGPTKVSVFIASNDAEQACNFKITGIYHDGTNLAPSSTLPVRFDYLKLLFLIRCAGDLVARREFVKKNYGDIKARNPSLPFLVRECSGVQPQLWARYGTRASISSSFSCCG

SEQ ID NO: 79330 - protein, 147 aa, Zea mays
  Coding DNA Sequence Number=SeqID_37551
  Homolog annotation: Hit_ID=Q10BI2; Match level="QueryCoverage=26%, HitCoverage=19%, E-value=2e-07, Identity=71%"; Hit description =Expressed protein
LGLDTGALADKEGEGGVAGLDACSASLLAMKTLTLVGPRSWITDGFTTLNTRSHRRELSPWSRVCRGEAAAALAVGDPWAGAKGAREGAAAARLRDPWGMRDPWWGRGRCVGGESVRIGRLRDSKAYWTVEIVRRQNQAETAYPLEP

SEQ ID NO: 79331 - protein, 430 aa, Zea mays
  Coding DNA Sequence Number=SeqID_37552
  Homolog annotation: Hit_ID=Q84SL1; Match level="QueryCoverage=37%, HitCoverage=59%, E-value=2e-91, Identity=95%"; Hit description =Putative Tic20 protein
YPELTSKPRWWWRTLACVPYLLPLHNMWSYADVIYQLHTYLQGFSLLYTFIDTMTLCPGWLFLVIFMTVYFFVVRRKWSPHFLRFHVILAILLDTGSQAVATMCTWMPSIVYQGKPMQYFWMSIAFIQIFTVLECLRCALCGMYPNVPFISHTAFIHSDLNLFSRPMRTLSPPTHRPAPTTDPASPTDPAAAPQPLPPVLPSRPPMDLQQRALPPPPRLGKPGSIGDSSRRWDLVFSVVKPSVIQLRGPTKVSVFIASNDGSARSLRTIQWPANRSLHSRDRGPTPCHSRDRATKSRNVLTDAPTRPRARFPTPPSHNLPPVTLWTGRHSCGGRVAGGVAWRTRRPYNLQGLLPPHGVDLDGLHGRGGRGATAASEDIVDVPYHLDWPWHRQPPATARANGGVDLTVFKQFERMERKAKIRNGAIEDGPP

SEQ ID NO: 79332 - protein, 170 aa, Zea mays
  Coding DNA Sequence Number=SeqID_37553
  Homolog annotation: Hit_ID=Q8L8G4; Match level="QueryCoverage=29%, HitCoverage=11%, E-value=7e-21, Identity=90%"; Hit description =Nucleosome/chromatin assembly factor group C
  Pfam annotation: Domain name=CHCH; Domain location=30-71; Score=37.3; E_value=5.4e-08; Accession=PF06747.3; Description=CHCH domain
MAHRVVNGVMRPQTVQHEIVVSEAAAPAAPVMDGDACNIHSNAFQDCLNDYGSEISKCQFYLDMLNECRRGGVCLSFSSNWDYSWHAQEFCNVGDDACLILWDARTGIAPPVKVEKAHSGDVHCVDWNPLDFNYILIEYDGIKVQFGIIVETNSISISSLYVQVMNLSID

SEQ ID NO: 79333 - protein, 100 aa, Zea mays
  Coding DNA Sequence Number=SeqID_37554
  Homolog annotation: Hit_ID=Q8L8G4; Match level="QueryCoverage=49%, HitCoverage=11%, E-value=5e-21, Identity=90%"; Hit description =Nucleosome/chromatin assembly factor group C
MLCVGNFGVYLLIARCAQEFCNVGDDACLILWDARTGIAPPVKVEKAHSGDVHCVDWNPLDFNYILIEYDGIKVQFGIIVETNSISISSLYVQVMNLSID

SEQ ID NO: 79334 - protein, 281 aa, Zea mays
  Coding DNA Sequence Number=SeqID_37555
  Gene Ontology: Mol. function=transporter activity; Cellular component= membrane; Biological process=oligopeptide transport
  Homolog annotation: Hit_ID=Q9FU86; Match level="QueryCoverage=99%, HitCoverage=46%, E-value=1e-80, Identity=55%"; Hit description =Putative peptide transport protein
  Pfam annotation: Domain name=PTR2; Domain location=1-212; Score= -70.4; E_value=0.0025; Accession=PF00854.12; Description=POT family
MAAVETADDKSRRRPASAWRLCTVTQVEELKRMLRLLPVWASGIVFAAAYTQMTTTFVLQGDTLDPHVGGGFRVPAAALSVFDTLSVMLWVPLYDRLVVPLARRATGHRRGFTQLARMGAGLLVLAAAMLAAGALEVARRRVVARHGVYYDTHTGAGGDARYLPLSIFWQVPQYVVVGASEVFTLIGQIEFFYDQAPDAVRSLCSGLSITSFALGNYVSSALVAVVARATARAGRDDGWIPDDINRAHLDYFFWLLAMLCVGNFGVYLLIARWYTYKKTVD

SEQ ID NO: 79335 - protein, 80 aa, Zea mays
  Coding DNA Sequence Number=SeqID_37556
MNKNTRDTRFILRFGHTTKVPYFLVEAPTKSRVSFNPNPPFADHKDQALTLIFAQTSGTPVEVEVQLELRKLNSNEVQLS

SEQ ID NO: 79336 - protein, 69 aa, Zea mays
  Coding DNA Sequence Number=SeqID_37557
MNKNTRDTRFIPRFDHTTKVPYFLVEAPKKSQVSFNPNPPFADHKAKDIVEVEVQLELRKLNSAEVQLS

SEQ ID NO: 79337 - protein, 65 aa, Zea mays
  Coding DNA Sequence Number=SeqID_37558
  Subcellular localization annotation: CTP_CleavageSite=45; ConfidenceScore=5.04e-01
MAKLSFSAELNFSCVELSQLQLNFNFNWGPGRFNRDPGQVQPGSRKSSVGVFSPDLTGQNRLNWS

SEQ ID NO: 79338 - protein, 363 aa, Zea mays
  Coding DNA Sequence Number=SeqID_37559
  Homolog annotation: Hit_ID=Q94KM3; Match level="QueryCoverage=43%, HitCoverage=76%, E-value=3e-87, Identity=97%"; Hit description=MURB -like protein hMURB17
  Pfam annotation: Domain name=PP2C; Domain location=1-251; Score= -44.7; E_value=0.0024; Accession=PF00481.12; Description=Protein phosphatase 2C
  Pfam annotation: Domain name=Zea_mays_MuDR; Domain location=161-363; Score=588.8; E_value=5e-174; Accession=PF05928.2; Description=Zea mays MURB-like protein (MuDR)
  Pfam module annotation: Pfam domain module=PP2C::Zea_mays_MuDR; Domain location=1-251::161-363
RQVFDGHNGVSAAVYSKEHLLEHVMSALPPDIDREDWLQALPRALVAGFVKADIDFQRKGEVSGTTATLVVIDGFTVTVASVGDSRCILDTQGGELQLLTVDHHLEENAEEREHVTASGGEVGRLNLFGGQETTANRQNGKVTALGAAGEFSCSDNAGPIPISALYDAVEASHAAAVAASEARCAVFVAEKEAKAAVQFAAIAVDKVEAVKASSNVDLVDFKYHVNIKNSLRYAIQEMRRQSKLLHSVQKLCSTIPEVQGGKIGKVRGHLEHVCKELDKTSIVCEEDLETKNPTWDLYDNPSVDDEHPLDDDELGDGYSTEGPELWEMVFEDFKWEEIKANVSFEEHYRVINYRFEEINDRNM

SEQ ID NO: 79339 - protein, 560 aa, Zea mays
  Coding DNA Sequence Number=SeqID_37560
  Homolog annotation: Hit_ID=Q7F0H8; Match level="QueryCoverage=39%, HitCoverage=51%, E-value=2e-95, Identity=82%"; Hit description =Protein phosphatase 2C-like
  Pfam annotation: Domain name=PP2C; Domain location=167-448; Score =6.5; E_value=2.5e-06; Accession=PF00481.12; Description=Protein phosphatase 2C
  Pfam annotation: Domain name=Zea_mays_MuDR; Domain location=358-560; Score=588.8; E_value=5e-174; Accession=PF05928.2; Description=Zea mays MURB-like protein (MuDR)
  Pfam module annotation: Pfam domain module=PP2C::Zea_mays_MuDR; Domain location=167-448::358-560
  Subcellular localization annotation: CTP_CleavageSite=59; ConfidenceScore=5.43e-01
MKLLLSSMDASSTVVGPALAPATPPQASAGSAVAAAFPLFSSGGGHPARERNNGRQYRRGSTGGGEVKEALHWHSVGEVGWRTGRLETRNQRRNGRNSTTALLNRIKYSGPARRHASTRECWSVRRAPVERFLDLDTSCPPPPLLATLIGLELHAGGSERPALRYGHAGFAKRGEDYFLVKPDCLRVPGDPASAFSVFAVFDGHNGVSAAVYSKEHLLEHVMSALPPDIDREDWLQALPRALVAGFVKADIDFQRKGEVSGTTATLVVIDGFTVTVASVGDSRCILDTQGGELQLLTVDHHLEENAEEREHVTASGGEVGRLNLFGGQETTANRQNGKVTALGAAGEFSCSDNAGPIPISALYDAVEASHAAAVAASEARCAVFVAEKEAKAAVQFAAIAVDKVEAVKASSNVDLVDFKYHVNIKNSLRYAIQEMRRQSKLLHSVQKLCSTIPEVQGGKIGKVRGHLEHVCKELDKTSIVCEEDLETKNPTWDLYDNPSVDDEHPLDDDELGDGYSTEGPELWEMVFEDFKWEEIKANVSFEEHYRVINYRFEEINDRNM

SEQ ID NO: 79340 - protein, 111 aa, Zea mays
  Coding DNA Sequence Number=SeqID_37561
  Gene Ontology: Cellular component=cytoskeleton
  Homolog annotation: Hit_ID=Q9AXA6; Match level="QueryCoverage=53%, HitCoverage=15%, E-value=5e-11, Identity=77%"; Hit description =Probable protein ABIL1
MQPPQHYPPTPEAESRGPGPAPPPSTRRPWKSARASSRLYRDPVGFMLHDDGAGAQEPTPTTLHHLRVLREVLPPQQAEAGLSHVPSPGKLSTGYKALFVFNQILELPSGH

SEQ ID NO: 79341 - protein, 107 aa, Zea mays
  Coding DNA Sequence Number=SeqID_37562
  Gene Ontology: Mol. function=thiosulfate sulfurtransferase activity; Cellular component=mitochondrion; Biological process=sulfate transport
  Homolog annotation: Hit_ID=Q9ZPK0; Match level="QueryCoverage=46%, HitCoverage=13%, E-value=3e-19, Identity=84%"; Hit description =Thiosulfate sulfurtransferase
RSVHCKRTSPKWFAFRTNTDITYVLDILVTLTDLKLLFRFDGAVPEPRNGIRSGHVPGSKCVPFPQVLDSSQKLLPPDELRKRFEQEGGEDCTVRIWSIKTGELWSE

SEQ ID NO: 79342 - protein, 116 aa, Zea mays
  Coding DNA Sequence Number=SeqID_37563
  Gene Ontology: Mol. function=thiosulfate sulfurtransferase activity; Cellular component=mitochondrion; Biological process=sulfate transport
  Homolog annotation: Hit_ID=Q9ZPK0; Match level="QueryCoverage=82%, HitCoverage=18%, E-value=1e-22, Identity=56%"; Hit description =Thiosulfate sulfurtransferase
MEVKENIKTQTHQLIDARSKPRLHAFGSSYDYLKPLSALLTDLKLLFRFDGAVPEPRNGIRSGHVPGSKCVPFPQVLDSSQKLLPPDELRKRFEQEGGEDCTVRIWSIKTGELWSE

SEQ ID NO: 79343 - protein, 116 aa, Zea mays
  Coding DNA Sequence Number=SeqID_37564
  Gene Ontology: Mol. function=thiosulfate sulfurtransferase activity; Cellular component=mitochondrion; Biological process=sulfate transport
  Homolog annotation: Hit_ID=Q9ZPK0; Match level="QueryCoverage=82%, HitCoverage=18%, E-value=1e-22, Identity=56%"; Hit description =Thiosulfate sulfurtransferase
MEVKENIKTQTHQLIDARSKPRLHAFGSFYDYLKPLSALLTDLKLLFRFDGAVPEPRNGIRSGHVPGSKCVPFPQVLDSSQKLLPPDELRKRFEQEGGEDCTVRIWSIKTGELWSE

SEQ ID NO: 79344 - protein, 75 aa, Zea mays
  Coding DNA Sequence Number=SeqID_37565
  Gene Ontology: Mol. function=thiosulfate sulfurtransferase activity; Cellular component=mitochondrion; Biological process=sulfate transport
  Homolog annotation: Hit_ID=Q9ZPK0; Match level="QueryCoverage=98%, HitCoverage=12%, E-value=2e-11, Identity=50%"; Hit description =Thiosulfate sulfurtransferase
MEVKENIKTQTHQLIDARSKPRLHAFGSFYDYLKPLSALLTDLKLLFRFDGAVPEPRNGIRSGHVLGSKCVPFPQ

SEQ ID NO: 79345 - protein, 75 aa, Zea mays
  Coding DNA Sequence Number=SeqID_37566
  Gene Ontology: Mol. function=thiosulfate sulfurtransferase activity; Biological process=sulfate transport
  Homolog annotation: Hit_ID=Q9ZPK0; Match level="QueryCoverage=51%, HitCoverage=10%, E-value=6e-08, Identity=61%"; Hit description =Thiosulfate sulfurtransferase
MEVGPTTFEAKLQPHLLWSLDQVKENIKTQTHQLIDARSKPRLHAFGSFYDCLKPLSAYCKRTSPKWFAFRQILI

SEQ ID NO: 79346 - protein, 117 aa, Zea mays
  Coding DNA Sequence Number=SeqID_37567
  Homolog annotation: Hit_ID=Q9SE94; Match level="QueryCoverage=48%, HitCoverage=9%, E-value=5e-23, Identity=92%"; Hit description =Methylenetetrahydrofolate reductase 1
MAAGIGGQDWRVRNRGGAWLAAVIGGELGAWRAAFCAFLAAVIGGGGWGGPGGYVYQKAYLEFFCAKEKLYDQLIEKIKAFPSLTFIAVNKDGESFSNIAPNAVNAVTWGGLAWQGD

SEQ ID NO: 79347 - protein, 499 aa, Zea mays
  Coding DNA Sequence Number=SeqID_37568
  Homolog annotation: Hit_ID=Q6H819; Match level="QueryCoverage=10%, HitCoverage=24%, E-value=3e-12, Identity=66%"; Hit description =Putative chorismate mutase, cytosolic
  Pfam annotation: Domain name=PBD; Domain location=272-310; Score =17.6; E_value=0.0014; Accession=PF00786.18; Description=P21-Rho -binding domain
  Subcellular localization annotation: CTP_CleavageSite=44; ConfidenceScore=5.15e-01
MKMGDEETAAAVSLGSSGEKTAPAPAQRTAPRETSARPPVLRIRRESRTPQARTPRNLRYRIDLTPASQPSRTPPPPPAQEAEEGVHTSPLREPYSICSSERDDASEGAVLTRCGFSTWASMTALAMPYRPVLRRSGRPISFAASSARSGRPISFAASSARSSAFATSSPLRLLDVGVHDGSRDALQARVAEVRAPHLLRHEFGQRVGDVVGVKKLEDEAAAPDTELVDGCFAVGAAKAGAPLDVQPDAFACHPHRRPVGSGEGEDDSYEMEIGLPMDVQHVAHITFDRFHGLHAVARLLWSVDHLDLQLKTITLWPLLYLLDSLSSQYRAVATASCLPNLPIAAPPWNATSGTAPGAGAPSGGLVLVSKDPDNIREIATGMVVNPCPFIELWSAAPNHIENALRDEMLVEAEKANLEAAKKAVVALSRDEPTSQSTTGSSCTPGVEPPRVENKARIFEQNATDSECKVDPKVLSKLYDPWVMPHTKDVEVEYLLRCLD

SEQ ID NO: 79348 - protein, 594 aa, Zea mays
  Coding DNA Sequence Number=SeqID_37569
  Pfam annotation: Domain name=PBD; Domain location=272-310; Score =17.6; E_value=0.0014; Accession=PF00786.18; Description=P21-Rho -binding domain
  Subcellular localization annotation: CTP_CleavageSite=44; ConfidenceScore=5.15e-01
MKMGDEETAAAVSLGSSGEKTAPAPAQRTAPRETSARPPVLRIRRESRTPQARTPRNLRYRIDLTPASQPSRTPPPPPAQEAEEGVHTSPLREPYSICSSERDDASEGAVLTRCGFSTWASMTALAMPYRPVLRRSGRPISFAASSARSGRPISFAASSARSSAFATSSPLRLLDVGVHDGSRDALQARVAEVRAPHLLRHEFGQRVGDVVGVKKLEDEAAAPDTELVDGCFAVGAAKAGAPLDVQPDAFACHPHRRPVGSGEGEDDSYEMEIGLPMDVQHVAHITFDRFHGLHAVARLLWSVDHLDLQLKTITLWPLLYLLDSLSSQYRAVATASCLPNLPIAAPPWNATSGTAPGAAPSGGLVLVSKDPDNIREIATGMVVNPCPFIELWSAAPNHIENALRDEMLVEAEKANLEAAKKAVVALSRDSHHLANDGLDCSAVSLPFKLRSCSCHSRTSPPPPITAARNAQKAARQAPNSPPITAASHAPPRFLTLQSCPPIPAAISALRQLLPKSSPSRHQRPSRYMPCAASPPVLQISAVISASPIGGAQHQPRPHRLAPIHPPNWQEHDLSRAYFSVDNWVVLHSRRRATA

SEQ ID NO: 79349 - protein, 158 aa, Zea mays
  Coding DNA Sequence Number=SeqID_37570
MAHRGGAHNLAETAPSSGRRNPKSWPRAPSQVHSEAQDCNRIAYGYAGEDHAESTDSVEQPDPNLTGPSSRGEEGTTAEGVPHGDVRREGVNGLVKAILAQSQKEDGQGQDGLNCIRPRNMNLRTWDEVVHDMKSVVREKHEPVPKPPVEKLRLSGGK

SEQ ID NO: 79350 - protein, 123 aa, Zea mays
  Coding DNA Sequence Number=SeqID_37571
MAKMRRLLIPSPPPPWLTFAGIGGMRPVAGARGEDHAESTDSVEQPDPNLTGPSSHGEEGTTAEGVPHGDVRREGVNGLVKAILAQSQKEDGQGQDGLNCIRPRNMFLLFYFPFSVLFQVSSS

SEQ ID NO: 79351 - protein, 108 aa, Zea mays
  Coding DNA Sequence Number=SeqID_37572
MAASAVGFMAVALFPPPGEDHAGSTDSVEQPDPNLTDPSSRGEEGTTAERVPHGDVRREGVNGLVKAILAQSQKEDGQGQDGLNCIRPRNMFLLFYFPFSVLFQVSSS

SEQ ID NO: 79352 - protein, 303 aa, Zea mays
  Coding DNA Sequence Number=SeqID_37573
  Homolog annotation: Hit_ID=Q84TX2; Match level="QueryCoverage=18%, HitCoverage=2%, E-value=1e-19, Identity=80%"; Hit description=SCAR -like protein 1
  Subcellular localization annotation: CTP_CleavageSite=36; ConfidenceScore=5.16e-01
MKAARGRRWESRTSAPPSIPPTTKLAAYQTRQLRARSATVMPREGDGGIAARQIRLLARERKEGRSGLSRCKSVLVKNNRPCPGLPGKPVHGVAPFPASNSGSPSPDAISTLRQRFGNRADPDHQRLGWRGFLHAAQIQAIPRLGPSFELHKIYLPGNPRVHGCILLNIMRMEFFANSSSRGNVSRSLCVDFLFTNDFKAVKQFFSRLLIHTELYMCNMFAAEFFHDLHEEVMATASRGHGLLIRLQQLEAEFSMVEKAIVSQTGHSNYPHDDGLFFRFDVAAGAGASKRTCEAGCYCSTVQN

SEQ ID NO: 79353 - protein, 113 aa, Zea mays
  Coding DNA Sequence Number=SeqID_37574
  Subcellular localization annotation: CTP_CleavageSite=54; ConfidenceScore=5.62e-01
MVPFLPRHPQPASSARATGGIPASPAPPPAPREPPAPRVRRSFALQLRATRQLRASAVVMPRDEGRAGETLGKPHLRAPINPAHHQACRLPNPPAPREIRHSYAARGRWRDSR

SEQ ID NO: 79354 - protein, 412 aa, Zea mays
  Coding DNA Sequence Number=SeqID_37575
  Homolog annotation: Hit_ID=Q6Z130; Match level="QueryCoverage=28%, HitCoverage=36%, E-value=9e-55, Identity=87%"; Hit description =Hydrolase, TatD family like protein
  Pfam annotation: Domain name=TatD_DNase; Domain location=34-296; Score=-11.0; E_value=2.7e-06; Accession=PF01026.11; Description=TatD related DNase
MYVKVSMDDAPYLKMVDIKMYSSYEDLSMALEKMFNCFITGEYCSVLCFCLMHFPLVSTASSNDISARELSSYSFTEQNFKQVISANWAPNSYYRSNIQYEDFGSAAGQATGSAVGLPGKVYRFEQHHFSLGAGFKSCFCFPTILSIKFDKKTPNGKISFRQQVIVWWAGLMRGVVSIALAYNKINLVFGLSGVNGCSLKTNENLEVLRGIPVERLMIETDSPYCDIINTHAGSQYVKSVWPSKKKEKYEPDSTVKGRNEPCLVRQVLEVVAGRKGISDIEGLSRTLYRNTCRLFFPQDLDVSANAQLESVMAMESQAEALGQLATDDLLEGKDVAEPGTPVEILFVSGVLLTIGSKPTVQFFTKPKDHKCDSSEPDLCDSGCNGVQMTRPSVISKAGGLEREKDYRYTGSD

SEQ ID NO: 79355 - protein, 444 aa, Zea mays
  Coding DNA Sequence Number=SeqID_37576
  Homolog annotation: Hit_ID=Q6Z130; Match level="QueryCoverage=26%, HitCoverage=36%, E-value=1e-54, Identity=87%"; Hit description =Hydrolase, TatD family like protein
  Pfam annotation: Domain name=TatD_DNase; Domain location=34-296; Score=-11.0; E_value=2.7e-06; Accession=PF01026.11; Description=TatD related DNase
MYVKVSMDDAPYLKMVDIKMYSSYEDLSMALEKMFNCFITGEYCSVLCFCLMHFPLVSTASSNDISARELSSYSFTEQNFKQVISANWAPNSYYRSNIQYEDFGSAAGQATGSAVGLPGKVYRFEQHHFSLGAGFKSCFCFPTILSIKFDKKTPNGKISFRQQVIVWWAGLMRGVVSIALAYNKINLVFGLSGVNGCSLKTNENLEVLRGIPVERLMIETDSPYCDIINTHAGSQYVKSVWPSKKKEKYEPDSTVKGRNEPCLVRQVLEVVAGRKGISDIEGLSRTLYRNTCRLFFPQDLDVSANAQLESVMAMESQAEALGQLATDDLLEGKDVAEPGTPVEILFVSGVLLTIGSKPTVQFFTKPKDHKCDSSEPDLCDSGCNGVQMTRPSVISKAGGLEREKDYRYTGSDGKCKFDKSKIVASIQNFSVVSVDEGQNVANLI

SEQ ID NO: 79356 - protein, 126 aa, Zea mays
  Coding DNA Sequence Number=SeqID_37577
  Gene Ontology: Mol. function=cysteine-type endopeptidase activity; Biological process=proteolysis
  Homolog annotation: Hit_ID=Q10716; Match level="QueryCoverage=60%, HitCoverage=21%, E-value=2e-27, Identity=78%"; Hit description =Cysteine proteinase 1 precursor
MRALKSGGRHRHDTDQPNTDEWQVGGRGARISAVAVKVVGVVQFFTKPKDHKCDSSEPDLCDSGCNGVQMTCPSVISKAGGLEREKDYRYTGSDGKCKFDKSKIIASIQNFSVVSVDEGQNVANLI

SEQ ID NO: 79357 - protein, 86 aa, Zea mays
  Coding DNA Sequence Number=SeqID_37578
MPCPRRFDLHCEHEAGKTEPPLPQANVVELTVHDRLCDACRLPPSLLILCHREGRVLAIEETFKHRVTNVVFIEETFNPSVFLHQE

SEQ ID NO: 79358 - protein, 152 aa, Zea mays
  Coding DNA Sequence Number=SeqID_37579
  Gene Ontology: Mol. function=DNA binding; Cellular component =ribonucleoprotein complex; Biological process=snRNP protein import into nucleus
  Homolog annotation: Hit_ID=O80401; Match level="QueryCoverage=67%, HitCoverage=23%, E-value=5e-26, Identity=57%"; Hit description=SAR DNA binding protein
  Pfam annotation: Domain name=Nop; Domain location=1-68; Score=-52.1; E_value=0.0028; Accession=PF01798.8; Description=Putative snoRNA binding domain
ALFITLKTKHSTPKYGLVYLTSLIGKASQKHKGKISLSLATKTTLVIYYDGKDNSIATESQIKFLKVENLGNQLVQQKGKPKIEVYGKDKKKGDGALTTHARRFVSTMPCPRRFDLHCEHEAGKTEPPLPQAHVVELTVHDRLCDACGPSMS

SEQ ID NO: 79359 - protein, 217 aa, Zea mays
  Coding DNA Sequence Number=SeqID_37580
  Gene Ontology: Mol. function=3'-5'-exoribonuclease activity; Cellular component=nuclear exosome (RNase complex); Biological process=RNA processing
  Homolog annotation: Hit_ID=Q69T30; Match level="QueryCoverage=61%, HitCoverage=36%, E-value=9e-56, Identity=80%"; Hit description =Putative polymyositis/scleroderma autoantigen 1
  Pfam annotation: Domain name=RNase_PH_C; Domain location=127-195; Score=44.2; E_value=4.3e-10; Accession=PF03725.5; Description=3' exoribonuclease family, domain 2
MAVSAFEFASHCGAWIYGGSVELTMEHGWRKFVGEEKNSADKSAPQVNHPQQPAQPAKRLTQRAHVSVTQARIAGHAGISLMQLISLHWQLLSTFWRPECTVGGDDGQQVTVHDPEVRDPLPLTIHHMPIAVTFAYFGEGNIVVLDPTYKEEAVMGGRMTAIVNSNGDVCAIQKAGGEGLMSSVTMQCLRIAPVKVADITSKIKKALENVHRYYISI

SEQ ID NO: 79360 - protein, 210 aa, Zea mays
  Coding DNA Sequence Number=SeqID_37581
  Homolog annotation: Hit_ID=Q2QYT4; Match level="QueryCoverage=64%, HitCoverage=59%, E-value=4e-35, Identity=52%"; Hit description =Expressed protein
MCPAEPYVLSGGKDKSVVLWSIQDHISALGDSSSSPGASGSKQSVKTANEKESPKLILEGGEFDAVKPLKQSRVGFRGQAWFHINFWARPRSSSSNNKTIKRFFAEVHYKPTSISSPSSSSSSLAITAVPIVQICIIIEEPLSQYRRSCAFCPSYRDILHPKGCRKVVCGNDKDLFEQRLDPCCCTGMGIGKMPFTARPDMSAFLNISPK

SEQ ID NO: 79361 - protein, 286 aa, Zea mays
  Coding DNA Sequence Number=SeqID_37582
  Homolog annotation: Hit_ID=Q2QYT4; Match level="QueryCoverage=57%, HitCoverage=71%, E-value=2e-36, Identity=50%"; Hit description =Expressed protein
MAGRMTAIVNSNGDVCAIQKAGGEGLMSSVTMQCLRIASVKAADITSKIKKAILTGHKENEEFALAMCPAEPYVLSGASGSKQSVKTANEKESPKLILEVYFMDMTTQLKMFSSTLPGISATSSKFPRFSTLSPTTMPGTLYGGEFDAVKPLKQSRVGFRGQAWFHINFWARPRSSSSNNKTIKRFFAEVHYKPTSISSPSSSSSSLAITAVPIVQICIIIEEPLSQYRRSCAFCPSYRDILHPKGCRKVVCGNDKDLFEQRLDPCCCTEGTILGRIPTVRDMVMV

SEQ ID NO: 79362 - protein, 138 aa, Zea mays
  Coding DNA Sequence Number=SeqID_37583
MESQPERRVGSIMAPSMATLPERIMGKGNGCSNAPVNRETNGLRHLRFESRGEDVRRARRSRRGGRSRKGKAVGLVRLPGLRAWGSVDGGARQSRLGVAGVQVQGHGSGSWRLPSAVGRGWPGRGTCGWGWVAAQLGA

SEQ ID NO: 79363 - protein, 91 aa, Zea mays
  Coding DNA Sequence Number=SeqID_37584
  Subcellular localization annotation: CTP_CleavageSite=71; ConfidenceScore=5.10e-01
MQRRPALEADPAARAQAPSCAATQPHPQVPRPGHPRPTALGSRQDPLPCPCTCTPATPRRDCLAPPSTEPQARNPGSRTKPTALPFLDARN

SEQ ID NO: 79364 - protein, 136 aa, Zea mays
  Coding DNA Sequence Number=SeqID_37585
MPSSSSFAADTPPAGASSEDTLSNVAVEELHPGDTVEFGVSRISSVRRRPALEADPAARAQAPSCAATQPHPQVPRPGHPRPTAPGSRQDPLPCPCTCTPATPRRDCLAPPSAEPQARNPGSRTKLTALPFLDARN

SEQ ID NO: 79365 - protein, 388 aa, Zea mays
  Coding DNA Sequence Number=SeqID_37586
  Gene Ontology: Mol. function=kinase activity; Cellular component =soluble fraction; Biological process=N-acetylmannosamine metabolic process
  Homolog annotation: Hit_ID=Q6ZF69; Match level="QueryCoverage=83%, HitCoverage=92%, E-value=1e-170, Identity=90%"; Hit description =Putative Transcriptional regulators of NagC/XylR (ROK) family, sugar kinase
  Pfam annotation: Domain name=BcrAD_BadFG; Domain location=25-325; Score=214.9; E_value=1.8e-61; Accession=PF01869.10; Description =BadFBadGBcrABcrD ATPase family
MQRLTGRDMWDVEECQSPRMGSVILGVDGGASNTVCVCIPAAMPFNDPLPVLSRTVAGCSNHNSVGEDRARETLERVMSQALLKARRRRSNVCAVCLAVAGVNHPVDQQRMLDWLRDIFPSHVKLFVENDAVAALASGTMGKLHGCVLIAGTGTIAYGFTSDGREARAAGAGPVLGDWGSGYGISAQALTAVVRAYDGRGPETVLTNNILDFLGLASPDELIGWTYEDQSWARIADLLPVVVESAESGDEVANKILHNSVGELASSVKAVVQRLDLGGEDGKHPFPLVMVGKVLEANKKWDIGKEVIDCVTKNYPGAYPIHPKFQTDTSSYYKICQISIHEFLSSVAHQPSNGNSHTSGNDVPVTSGVRVSALNAPKRQQPGWDKARE

SEQ ID NO: 79366 - protein, 249 aa, Zea mays
  Coding DNA Sequence Number=SeqID_37587
  Gene Ontology: Mol. function=kinase activity
  Homolog annotation: Hit_ID=Q6ZF69; Match level="QueryCoverage=74%, HitCoverage=52%, E-value=2e-95, Identity=92%"; Hit description =Putative Transcriptional regulators of NagC/XylR (ROK) family, sugar kinase
  Pfam annotation: Domain name=BcrAD_BadFG; Domain location=2-186; Score=13.6; E_value=1.9e-07; Accession=PF01869.10; Description =BadFBadGBcrABcrD ATPase family
MGKLHGCVLIAGTGTIAYGFTSDGREARAAGAGPVLGDWGSGYGISAQALTAVVRAYDGRGPETVLTNNILDFLGLASPDELIGWTYEDQSWARIADLLPVVVESAESGDEVANKILHNSVGELASSVKAVVQRLDLGGEDGKHPFPLVMVGKVLEANKKWDIGKEVIDCVTKNYPGAYPIHPKFQTDTSSYYKICQISIHEFLSSVAHQPSNGNSHTSGNDVPVTSGVRVSALNAPKRQQPGWDKARE

SEQ ID NO: 79367 - protein, 205 aa, Zea mays
  Coding DNA Sequence Number=SeqID_37588
  Gene Ontology: Mol. function=DNA binding; Cellular component=nucleus; Biological process=response to DNA damage stimulus
  Homolog annotation: Hit_ID=Q682D3; Match level="QueryCoverage=72%, HitCoverage=39%, E-value=3e-14, Identity=34%"; Hit description=DNA -repair protein XRCC2 homolog
MANLSLKPTPFYSIGAFYWIDRGSQASRENKGKTLQSIFESVVHELRKILQLEPALVLVTKASVYGEGTTTANDFNRDSSKYMLEDPSGLGYSRREEERTLSNREYMPSIWQSFVTHRINLQVEAEVPSVLESEVLPLHTSEWVQPCLKMKEKFSIMDLQQSKQLQQCRLVASRTRPIAILKFLIGLQYYEPGAVNHVFMILEDY

SEQ ID NO: 79368 - protein, 416 aa, Zea mays
  Coding DNA Sequence Number=SeqID_37589
  Gene Ontology: Mol. function=DNA binding; Cellular component=nucleus; Biological process=response to DNA damage stimulus
  Homolog annotation: Hit_ID=Q682D3; Match level="QueryCoverage=78%, HitCoverage=79%, E-value=3e-37, Identity=32%"; Hit description=DNA -repair protein XRCC2 homolog
  Subcellular localization annotation: CTP_CleavageSite=64; ConfidenceScore=5.12e-01
MAGEAGKDPQAWLAANETASAFLSRSLSSRPPITLPPPLHRAPLRPGNVVEIAGPSNSGKSHLLLMAAVQCILPKEWEGIYFGGLGRAVMYLDLDCRFDVLRLAQILRNRIAEGCRLAHLRNGDPENDVTKDEFQCSLQNTLFSDCMQRFLYARCCKSPEFIDALKWVVSGCWRKLITAVPKEMCKGLSSLMILVAWEVWKHRNDSVFENLSPSTQAVLRSTVQSQSRREVSGAGIYFVMIDRKTLQSIFESVVHELRKILQLEPALVLVTKASVYGEGTTTANDFNRDSSKYMLEDPSGLGYSRREEERTLSNREYMPSIWQSFVTHRINLQVEAEVPSVLESEVLPLHTSEWVQPCLKMKEKFSIMDLQQSKQLQQCRLVASRTRPIAILKFLIGLQYYEPGAVNHVFMILEDY

SEQ ID NO: 79369 - protein, 132 aa, Zea mays
  Coding DNA Sequence Number=SeqID_37590
  Gene Ontology: Mol. function=DNA binding; Cellular component=nucleus; Biological process=response to DNA damage stimulus
  Homolog annotation: Hit_ID=Q682D3-2; Match level="QueryCoverage=50%, HitCoverage=22%, E-value=3e-19, Identity=61%"; Hit description =Isoform 2 of Q682D3
  Subcellular localization annotation: CTP_CleavageSite=64; ConfidenceScore=5.12e-01
MAGEAGKDPQAWLAANETASAFLSRSLSSRPPITLPPPLHRAPLRPGNVVEIAGPSNSGKSHLLLMAAVQCILPKEWEGIYFGGLGRAVMYLDLDCRFDVLRLAQILRNRIAEGCLLYIEEPGFNLNLFYIF

SEQ ID NO: 79370 - protein, 51 aa, Zea mays
  Coding DNA Sequence Number=SeqID_37591
MKYYLRLVLYLKVTEVLFEVGIVSEDDVGFIPSEVLLTREVYRTQCGLFEE

SEQ ID NO: 79371 - protein, 77 aa, Zea mays
  Coding DNA Sequence Number=SeqID_37592
MKYYLRLVLYLKVNEVLFEVGIVSEVWVVTYGSDRTGTTYPPSLPEEGFSLTQGSVIEPMGGLFEEMRWVLGYIKDY

SEQ ID NO: 79372 - protein, 60 aa, Zea mays
  Coding DNA Sequence Number=SeqID_37593
MKYYLRLVLYLKVNEVLFEAGIVSKDGMVLYSKRYLIHVGNEGSSSTSTFTDNNAVQAHP

SEQ ID NO: 79373 - protein, 87 aa, Zea mays
  Coding DNA Sequence Number=SeqID_37594
MKYYLRLVLYLKMMWFYTLRGACCSSREVGSSSTSVGAKAKTPPFARGLHCSRWSDRDKTGRDTLRSIRRQTKSCGDVIPRHGLVQL

SEQ ID NO: 79374 - protein, 73 aa, Zea mays
  Coding DNA Sequence Number=SeqID_37595
MAPKRKNQNSAAVVIPPIDPNSQLPFTGKMKYYLRLILYLKVNEVLFEVGIVSEDDVVLYSQRCLLLIKGSGK

SEQ ID NO: 79375 - protein, 78 aa, Zea mays
  Coding DNA Sequence Number=SeqID_37596
MPYKRFAEAIIMASKKYKIAYSKKHSGWVEDIFKWEHTIRTGVPIDLRGLNTSYLILQAMTMWGNDIRMEFVRDEKIL

SEQ ID NO: 79376 - protein, 355 aa, Zea mays
  Coding DNA Sequence Number=SeqID_37597
  Homolog annotation: Hit_ID=Q5QLV7; Match level="QueryCoverage=20%, HitCoverage=14%, E-value=8e-07, Identity=36%"; Hit description=EBNA -1-like protein
MAQICSTERRVLLYLDHDMVFIPINIRGTHWYLVVINAKKYGDTSARFTCSSCGLFLLNYIEYWTGDELSDSFTQEKMAAILLSLDLNKRRGCLLYKYEKEVDSGSPSDVEILENPTNSKKRKLLHVLDDSEVVFEDEEGPITQADLQRWFDDDGDKRTPVKVSTDGCTNDFLMVGLSTKDMPVTKADSSIDVLCDYIMAIEDDTTLEMTWVRSFNPFKIEISIKDLQNILTINQDMTLRCFDMAVRLLANKESCRPKEEIIKNRKHYTDMRLWIYHVKKHVTFIDFTPTQDWCKHMPYKRFAEAIIMASKKYKIAYSKKRSRWTEDIFKWEHTIRTGVPIDLRGYFLRTIFAVI

SEQ ID NO: 79377 - protein, 280 aa, Zea mays
  Coding DNA Sequence Number=SeqID_37598
  Gene Ontology: Mol. function=cysteine-type peptidase activity; Biological process=proteolysis
  Homolog annotation: Hit_ID=Q109R5; Match level="QueryCoverage=78%, HitCoverage=21%, E-value=4e-28, Identity=34%"; Hit description=Ulp1 protease family, C-terminal catalytic domain containing protein
  Pfam annotation: Domain name=Peptidase_C48; Domain location=39-257; Score=28.9; E_value=4e-06; Accession=PF02902.9; Description=Ulp1 protease family, C-terminal catalytic domain
MDTGLSYLMNGDLALIDFIKEIPCEPRVEVVLIDDAFVERKSMECLFQLNAYLDDEVIDCYINLIKAQKHLKCRSGGHVLIENAFQFNFLKRDGDVEIRTKELYPIKDMAQICSAERRVLLYLDHDMVFIPINIRETHWYLVVIHSRNMEIQVLDSLGTSQQDRKDLTDCIKGLQRQTDMIYQRKELKDHRWPDLQVASWPLKEIEMAYAKQTYSSSCGLFLLNYIEYWTGDELSDSFTQDVKIFRRNFVIDLLSYEDNSCRYAISANIQQRLIDIAKKD

SEQ ID NO: 79378 - protein, 303 aa, Zea mays
  Coding DNA Sequence Number=SeqID_37599
  Homolog annotation: Hit_ID=Q2HUD0; Match level="QueryCoverage=82%, HitCoverage=19%, E-value=2e-86, Identity=69%"; Hit description=WD40 -like
  Pfam annotation: Domain name=RIC1; Domain location=5-183; Score= -102.3; E_value=4.1e-06; Accession=PF07064.4; Description=RIC1
MGIRKRIAGGRGIPHQIAAVVRNPRQIRCQAPVADKKLRRASGSVLEGCVGADFAAALQQRRMFEECFQQRWYRTAACYILVIAKLEGPAVSQYCALRLLQVIFLPPPCGGFSLGISCLRCSISQSHLHVTVAFQATLDESLYELAGELVRFLLRSGRDFENATPDSEKLSPRFLGYFLFRSPYKRQSSDLRSNSMKELSPHIASVMNILERHASYLMSGKDLSKLVAFVKGTQFDLVEYLQRERQGSARLENFASALELIGQKLQMDTLQSRLDAEFLLAHMCSVKFKEWIVVLATLLRRAE

SEQ ID NO: 79379 - protein, 393 aa, Zea mays
  Coding DNA Sequence Number=SeqID_37600
  Homolog annotation: Hit_ID=Q2HUD0; Match level="QueryCoverage=81%, HitCoverage=23%, E-value=1e-100, Identity=64%"; Hit description=WD40- like
  Pfam annotation: Domain name=RIC1; Domain location=1-193; Score= -112.2; E_value=1.7e-05; Accession=PF07064.4; Description=RIC1
MGNLWISAEGEENLGEQGSGRDSRMERIAPGGAIRGCREQGMGIGSGIRGGRGVSHQIRGGRGESAAYDHDRMFEECFQQRWYRTAACYILVIAKLEGPAVSQYCALRLLQVIFLPPPCGGFSLGISCLRCSISQSHLHVTVAFQATLDESLYELAGELVRFLLRSGRDFENATPDSEKLSPRFLGYFLFRSPYKRQSSDLRSNSMKELSPHIASVMNILERHASYLMSGKELSKLVAFVKGTQFDLVEYLQRERQGSARLENFASALELIGQKLQMDTLQSRLDAEFLLAHMCSVKFKEWIVVLATLLRRAERVFWMYGFHLNLRQLNDCEWCSATSLVLVDLFRHDLRLWKAYSITLQSHDVFTEYLDLLNILEEELSSVSDLTLQNGPLS

SEQ ID NO: 79380 - protein, 68 aa, Zea mays
  Coding DNA Sequence Number=SeqID_37601
  Homolog annotation: Hit_ID=Q2HUD0; Match level="QueryCoverage=73%, HitCoverage=4%, E-value=3e-11, Identity=68%"; Hit description=WD40 -like
MKQIKELELERNSLVLVDLFRHDLRLWKAYSITLQSHDVFTEYLDLLNILEEELSSVSDLTLQNGPLS

SEQ ID NO: 79381 - protein, 143 aa, Zea mays
  Coding DNA Sequence Number=SeqID_37602
APHVIQADPKREEGESSHRERATAPRLYALPSSPQPAVKKANRCTGSVQPPCGYSPFHLHHNQRSRRRNAAQRACNRPAVMCPLGFDRWSNLWHGGPGPHDMHSAHQFLGAEKSHRHSRQYRASSRPSQKAEKINFQIQLIVA

SEQ ID NO: 79382 - protein, 528 aa, Zea mays
  Coding DNA Sequence Number=SeqID_37603
MDTCLLGWSGARVTAQPGSVLWACTLHHSATGPGPSQGYLLGAIANSFLGMLVCSLDKSSLRPRGARNGLLCTSRVALEASSGQPHQRRRPPLLRAAHLRKRPPLHQRLASDGGHLRTGGLPATAAPTVRAKRSSPSSSYRGEDKTIKERDRHLYSVRRLVQPPGRHRSSTAGGAGDATDVADLCTARSSPERWMDSHASLSGRRQRRRRHQSHQSQRDGAAARLASHPQRVGARGMEPWLSPLPTFTRLVIILPPNAGGRSGMERHLHGHPAEVGDDGRLKDEAGRHGKVVERRDTSTSPPGKYQRIPSKQAVYHFEHSLSLGVLGMKSQGHGKLRQREVETLKAKGRRELGGERTPRVGEKQDMAATRGVNPFLKADFPARAPKRHGQGLPRCAPGFPSYDTGARPHMSYKLARSAKKANRRTGSMPPPRGSPHVMPLARQFLGAKKSHRRSRQYRVSSGPSQKTEKINFQNQCSDSRHPAHGPTKTLSAEVTGQSAAGTGVAVDVTMGRPAVIASTGAQWQRANR

SEQ ID NO: 79383 - protein, 144 aa, Zea mays
  Coding DNA Sequence Number=SeqID_37604
MAKARGRGLPHQTQMGTQGRDLVLRQVPNQEGLRNSPPAGKDPSRRARQPGGGSKERKPVPWGGLEPVWPLSLVPYPKACTLHHSVMGTLVFGVISPMGPATWGPELENGHLSPGVVRSPCSRSTWFRIVDLHAPPLCDGCPST

SEQ ID NO: 79384 - protein, 152 aa, Zea mays
  Coding DNA Sequence Number=SeqID_37605
MAASARSSWSMCAAMGERELKKLETRDEGASCADAASHGGAEEGVPWVEGIRRGVELEVSMGTWGLVHCRAGLGGRLCLNSFIQTGHVYTYEIPMGNRVRIIASQTHTRLPNGWRFCPISIPMETIFVPYPYSNREIPHGLASIGSPLTSLD

SEQ ID NO: 79385 - protein, 114 aa, Zea mays
  Coding DNA Sequence Number=SeqID_37606
MGIIFVPYPYPNRGIPHGLSGIGSPLTSLGLTACQPHSVKWHCSRCGAGGAVLLSGRDLVRVASWRRQGLGQAGNMFVAGRGASGEMKILRGRLPLFEARLGRGVIESFEWTDP

SEQ ID NO: 79386 - protein, 184 aa, Zea mays
  Coding DNA Sequence Number=SeqID_37607
  Subcellular localization annotation: CTP_CleavageSite=27; ConfidenceScore=5.60e-01
MTFGWAAKRSAPRAHQRGSTPSRCTSRCATPLHTSCSRTLTQHQQQPSSQRTRIYGRGVAALDLVQATAAPELAEHSDACGQVGLLPEVELAVAKLLLIVDERRQRERLLPVVFVRGFQLGVGMHVGMGMSFAGRGNEKDSAGRDTIGNGKRVRTQLGMGMKTQTELEMSMGTRYPITHGEFPY

SEQ ID NO: 79387 - protein, 661 aa, Zea mays
  Coding DNA Sequence Number=SeqID_37608
  Homolog annotation: Hit_ID=O82775; Match level="QueryCoverage=32%, HitCoverage=83%, E-value=1e-11, Identity=27%"; Hit description =Expressed protein
MAGLVATLSGTIMARFLCMEDDNEVTGESPVADEWDMLSLTSSIYASPLFRRGFDPINLPGYGNVINIQEGTQTGLVMSDGFVFPPSEHENLPIEPEHEDLPIEPGHDESNTNSVEKESSCAGNNDDDWCHVSPEEIDDVSNENLADNSDLPTASEATVPDSQPTEINAKREKDHRTCKADHTCERWWKKKTTYLFHHIKGVTTLCSVVAAGAVVGFVVMGQRWQQDHWHLHQFKFSVSGELIRDGHPRRIWGGVSLHLCLSLVLPLRDGLLRRMWLVVLVRRRAMRGYLPWIAAAWWAGLVVAGVRGIGGVMVPIRDGHPRRIWGGVSLHLCLSLVLPLRDSLLRRMWLVVLVRRRAMRGYLPWIAAAWWAGLVVAGVRGIGGVMVMQPGPAQVPVRGDVPPPCIIEWSDQVASGEEDLANAVMVSVISDVPLVSAGEVAAVLAAMIDVAASSLVLRRASPSSFLLVLPDLVLVERLIGIQQPVRSLGGGLSLLCKRWNRLAGALGRVLPSLIDVELRGIPAHVWETSTADRLLCPYAWIQQVHPDTLGLLDLSSFRCLAWCSDLSKLPSSRELWVVEPPSGIVEVPPVKRVLSYPVEFRFSEVRAPAAPSPPASDGRDEDDGGDSSRGRRRRLRSPSRPRQSDPLAVTASGVGGSLREL

SEQ ID NO: 79388 - protein, 592 aa, Zea mays
  Coding DNA Sequence Number=SeqID_37609
  Homolog annotation: Hit_ID=O82775; Match level="QueryCoverage=35%, HitCoverage=83%, E-value=9e-12, Identity=27%"; Hit description =Expressed protein
MAGLVATLSGTIMARFLCMEDDNEVTGESPVADEWDMLSLTSSIYASPLFRRGFDPINLPGYGNVINIQEGTQTGLVMSDGFVFPPSEHENLPIEPEHEDLPIEPGHDESNTNSVEKESSCAGNNDDDWCHVSPEEIDDVSNENLADNSDLPTASEATVPDSQPTEINAKREKDHRTCKADHTCERWWKKKTTYLFHHIKGVTTLCSVVAAGAVVGFVVMGQRWQQDHWHLHQFKFSVSGELIRDGHPRRIWGGVSLHLCLSLVLPLRDGLLRRMWLVVLVRRRAMRGYLPWIAAAWWAGLVVAGVRGIGGVMVPIRDGHPRRIWGGVSLHLCLSLVLPLRDSLLRRMWLVVLVRRRAMRGYLPWIAAAWWAGLVVAGVRGIGGVMVMQPGPAQVPVRGDVPPPCIIEWSDQVASGEEDLANAVMVSVISDVPLVSAGEVAAVLAAMIDVAASSLVLRRASPSSFLLVLPDLVLVERLIGIQQPVRSLGGGLSLLCKRWNRLAGALGRVLPSLIDVELRGIPAHVWETSTADRLLCPYAWIQQVHPDTLGLLDLSSFRCLAWCSDLSKLPSSRELWVVEPPSGIVEVPPVKR

SEQ ID NO: 79389 - protein, 139 aa, Zea mays
  Coding DNA Sequence Number=SeqID_37610
MAGLVATLSGTIMARFLCMEDDNEVTGESPVADEWDMLSLTSSIYASPLFRRGFDPINLPGYGNVINIQEGTQTGLVMSDGFVFPPSEHENLPIEPEHEDLPIEPGHDESNTNSVEKESSCAGNNDDDWCHVSPEEIDD

SEQ ID NO: 79390 - protein, 303 aa, Zea mays
  Coding DNA Sequence Number=SeqID_37611
  Homolog annotation: Hit_ID=Q2R575; Match level="QueryCoverage=16%, HitCoverage=4%, E-value=7e-22, Identity=96%"; Hit description =Phospholipid-translocating P-type ATPase, flippase family protein, expressed
NKALALSKGVEQIWGIGVDLGWGTRWRLGTLRWVVEEESEGGRRGCLAEPRGEGERHLQGHNLGETATMSVPHGRRQDLELAIDDFDEELIDPELRYSFQRNSKSIQQTLALLTYRNLFGIAIRLPVMLLRDRRACFSDRGRKEWRAFSGSLLRSNGVEVHVPLHGADAAQLARCFMNQYFLLIACLQLWSLITPVNPASTWGPLIFIFAVSATKEAWDDYNRHNLTYALMTVVVQVTSLKVVNNEGWERLYGGLMLSLGVYYYFYQIFRNRAEARALEQSRRRLGDGSVGMLQSLTIAALSG

SEQ ID NO: 79391 - protein, 161 aa, Zea mays
  Coding DNA Sequence Number=SeqID_37612
MTTHTAEELATQIEQQKLEEQKTEPRNKALALSKGVEQIWGISVDLGWGTRWRLGTLRWVVEEESEGGRRGCLAEPRGEGERHLQGHNLGETATMSVPHDRRQDLELAIDDFDEELIDPELRYSFQRNSKSIQQTLALLTYRNLFGIAIRLPVMLLRDRRA

SEQ ID NO: 79392 - protein, 171 aa, Zea mays
  Coding DNA Sequence Number=SeqID_37613
MGGARSSRGHAGAEPTAPGRAGPHQAHYRARRAADGHAELHFGAALGCACRADRLRGRAGHGQPRHEPSRTRSGAQAEERASFASDSSGLTKTLVAGCGGVGVTGTSPVSSRERERVEGRNSAAGLLFAEASGRERAVGAGRGGETHGPRARGDGEGVSGRARPNGPEKQA

SEQ ID NO: 79393 - protein, 81 aa, Zea mays
  Coding DNA Sequence Number=SeqID_37614
MGGARSSRGHAGAEPAAPGRTGPHQAHYRARRAADGHAELRFGAALGCACRADRLRGRAGHGQPHHGPSRTRSGAQAEERA

SEQ ID NO: 79394 - protein, 191 aa, Zea mays
  Coding DNA Sequence Number=SeqID_37615
MGGARSSRGHAGAEPTAPGRAGPHQAHYRARRAADGHAELHFGAALGCACRADRLRGRAGHGQPRHEPSRTRSGAQAEERARGWRLPTEQVQEEKMVVFPYKGETTLRPSKGKGNDKTWRGENATKVRIGKTPFSNRDGKDDISKGRHRISIMKRSRDYKDKTCKASKKGVQSMVKWVRHYPRTGTEKRRL

SEQ ID NO: 79395 - protein, 155 aa, Zea mays
  Coding DNA Sequence Number=SeqID_37616
  Homolog annotation: Hit_ID=Q9FH78; Match level="QueryCoverage=61%, HitCoverage=48%, E-value=2e-07, Identity=31%"; Hit description =Arabidopsis thaliana genomic DNA, chromosome 5, TAC clone:K9E15
  Pfam annotation: Domain name=Hin1; Domain location=8-130; Score=-2.5; E_value=0.0025; Accession=PF07320.4; Description=Harpin-induced protein 1 (Hin1)
  Subcellular localization annotation: CTP_CleavageSite=56; ConfidenceScore=5.04e-01
YANIVCAYYVNQAHDPAHALTIIQSHAVTIKTPPRRQGLGFSGGGGSIGRASRRPLAVLRAYPFRVPAKGVLPLAYVARAQGAPLGDAGSAAMEAALRDGVVPFRVDGEARTRWKVAGIIGVDQWTRLACQLRFFWPNSTVLPFRCISKSKFLFF

SEQ ID NO: 79396 - protein, 214 aa, Zea mays
  Coding DNA Sequence Number=SeqID_37617
  Pfam annotation: Domain name=Hin1; Domain location=45-189; Score= -12.5; E_value=0.018; Accession=PF07320.4; Description=Harpin-induced protein 1 (Hin1)
MKLGSNDCGFFVMRYMQHYDYMDGAMNAVIDLDNSEDIRSLVLQYIIFYRLNRNNSMNPGLYLTTGSPDQAPVSRRAPTAAALSSRRIGGRGGGTRRSLSVRGAPRAVRGGAGRLAVLRAYPFRVPAKGVLPLAYVARAQGAPLGDAGSAAMEAALRDGVVPFRVDGEARTRWKVAGIIGVDQWTRLACQLRFFWPNSTVLPFRCISKSKFLFF

SEQ ID NO: 79397 - protein, 684 aa, Zea mays
  Coding DNA Sequence Number=SeqID_37618
  Gene Ontology: Mol. function=cysteine-type peptidase activity; Biological process=proteolysis
  Homolog annotation: Hit_ID=Q53MK8; Match level="QueryCoverage=45%, HitCoverage=31%, E-value=8e-18, Identity=24%"; Hit description=Ulp1 protease family, C-terminal catalytic domain, putative
MGRTLVRNVAIPGWGFLAAASIMRKVDRPPTNPKRLIIESSQECFSVDIPRSTDMADPTNTPSDGDPPQHRKTGVAAAAKNIAMPNVDDDDFEPPKKKCNISMDAPNKTQKLNIRCNPGDVLASIHILNERQRQAIVRKEFSSIIDMTIDAIGCRTLLCWLMQKLDPRDMTLRIGPDKELKITKQTVHQILGLPNLGGGKPLNVNEANAAATLRASLNISKDEFVISKLQDRLRLGQDDDLSIRCFFLILFNRLLFPTTSWSISFNEVVLTEEMERFPQIDWCHLIFSDLCEAAQRWHNRSINNVSATIYGCSIIVLLYYLDHLHHVAAPNNKNGTPRIKYFNKNIIRALSMADKRKPRQGGEPFGVCSFRSSSETCYVSKSPTTCQIEKFQATLIDYDLEVGKIFASIKQCLNTIGTKQSNLAATFGELIDEVLRADESVTPYTQGQTVVGGTVDNDSGPVFDKTPIGSVSAPGLFLSELECARALRAYLCSRFIELDRNIIDFGEHRANCCDIQQSFADGACLDNVFMQCFIECVRDDWSKHIPPLNAHQLILDVNVGIGRIHVLDSNPYGPEMGGTIWKNYHCISMDLGDRKVSWARLMMSRLNLAIQNARPRSAFPAFLKYLIELMNNCPTMKLGSNDCGFFVMRYMQNYDYMVGAMNAVIDPDNSEDIRSLVLHYLIFH

SEQ ID NO: 79398 - protein, 369 aa, Zea mays
  Coding DNA Sequence Number=SeqID_37619
  Gene Ontology: Mol. function=dolichyl-diphosphooligosaccharide -protein glycotransferase activity; Cellular component=endoplasmic reticulum; Biological process=protein amino acid glycosylation
  Homolog annotation: Hit_ID=O49868; Match level="QueryCoverage=91%, HitCoverage=71%, E-value=1e-172, Identity=85%"; Hit description =Putative ribophorin I homologue
  Pfam annotation: Domain name=Ribophorin_I; Domain location=2-368; Score=571.7; E_value=7.4e-169; Accession=PF04597.5; Description =Ribophorin I
AENVGPDPVSQVLLPFPNIQAKNLAAIRAFGSEGKVKGQSTVLPIEVVQPSGAPPELTFFSALLPKPLEKGKTLYLDVLTVFTHSLQPFPEEITQAEAQLVVYQDSAHYLSPYPVKAQTLAIRLPGGRVESYTRHPNAKLVDSELKYGPFHDLPPFSYLPVIVHFENNNPFAVAKEVIREIEISHWGNVQITEHYNIAHGGARLKGEFSRIDYQSRPYVRGVSSFRHLIAKLPPRAHSIYYRDEIGNISTSHLWSDSMKTQLEIEPRFPLFGGWQTTFTVGYGLPLEDFVFYSDGKRFLNITFGSPLEEILIEKLIVKVVLPEGSKDIEVSAPFPTQQQQESIFFTVMECETKQLSIHVSKASIPWCRL

SEQ ID NO: 79399 - protein, 556 aa, Zea mays
  Coding DNA Sequence Number=SeqID_37620
  Gene Ontology: Mol. function=dolichyl-diphosphooligosaccharide -protein glycotransferase activity; Cellular component=endoplasmic reticulum; Biological process=protein amino acid glycosylation
  Homolog annotation: Hit_ID=Q1T021; Match level="QueryCoverage=91%, HitCoverage=82%, E-value=0.0, Identity=64%"; Hit description =Ribophorin I
  Pfam annotation: Domain name=Ribophorin_I; Domain location=11-398; Score=605.5; E_value=4.9e-179; Accession=PF04597.5; Description =Ribophorin I
MATPPPPIRPAAALLLLVLAGVLASAASADLVISKADRRLFNLLELPRELTFFSALLPQTFGKRKDSVLGCSDCVHTLSSTIPQKKSLKAEAQLVVYQDSAHYLSPYPVKAQTLAIRLPGGRVESYTRHPNAKLVDSELKYGPFHDLPPFSYLPVIVHFENNNPFAVAKEVIREIEISHWGNVQITEHYNIAHGGARLKGEFSRIDYQSRPYVRGVSSFRHLIAKLPPRAHSIYYRDEIGNISTSHLWSDSMKTQLEIEPRFPLFGGWQTTFTVGYGLPLEDFVFYSDGKRFLNITFGSPLEEILIEKLIVKVVLPEGSKDIEVSAPFPTQQQQEVKYSHLDIVGRPVVVLEKPDVIPEHNLYFQVYYRFNNISLLREPLMLITGFFLLFVACIVYMRTDMSISKSSPSYLAKLQWDEVQATVQKIQGIFEQCLAVHDKLEASLRDLSRTGDIQSCKAARKAADTQFKELSKDLKPLLATLQSSPQSYQILPKVEDLIVKEREMQEKLMTRHSTVVDSFEKKLRGQDVENRIALQQQKIAALRQEVESLLEYISEI

SEQ ID NO: 79400 - protein, 81 aa, Zea mays
  Coding DNA Sequence Number=SeqID_37621
  Subcellular localization annotation: CTP_CleavageSite=53; ConfidenceScore=5.50e-01
MDSAVQPLWTASKRRLRRSLPYTAAHGPCRTASRGRTGSRQVSSRRRVLRIIVSEGKTKLLPYFSVPGGPSRHESKYNNRL

SEQ ID NO: 79401 - protein, 299 aa, Zea mays
  Coding DNA Sequence Number=SeqID_37622
  Homolog annotation: Hit_ID=P42211; Match level="QueryCoverage=33%, HitCoverage=20%, E-value=2e-48, Identity=90%"; Hit description =Aspartic proteinase precursor
  Pfam annotation: Domain name=Asp; Domain location=62-298; Score= -102.5; E_value=1.5e-07; Accession=PF00026.14; Description=Eukaryotic aspartyl protease
  Pfam annotation: Domain name=TFIIS; Domain location=1-43; Score=23.5; E_value=4.7e-05; Accession=PF08711.1; Description=Transcription factor S-II (TFIIS)
  Pfam module annotation: Pfam domain module=Asp::TFIIS; Domain location=62-298::1-43
MDIGHHVNGLRKHPSNEVRQLVKLLVRKWKEILDDWVRLHNSGGDGSGSIICMAMVTHLTKSNPSTIKILMESNSEPEECYSDHLTNSVKSFFMKDLKGTWYSSEHGFNDGNCDQARRPHRVVVESREAMPLSFDNSTTEDSAAAVKPKPKVRVRKNPMKQSCFDFTKVDVVLLPIVFLLVRPNVGKSALFNRIIASLRANQLCERLPSPNGESTVDCHQISKMPNLAFTIANKTFTLTPEQYIVKLEQAGQTICISGFMAFDVPPPRGPLWILGDVFMSVYHTVFDFGENMIGFAKSA

SEQ ID NO: 79402 - protein, 141 aa, Zea mays
  Coding DNA Sequence Number=SeqID_37623
  Gene Ontology: Mol. function=aspartic-type endopeptidase activity; Cellular component=lysosome; Biological process=sphingolipid metabolic process
  Homolog annotation: Hit_ID=P42211; Match level="QueryCoverage=70%, HitCoverage=20%, E-value=2e-49, Identity=90%"; Hit description =Aspartic proteinase precursor
  Pfam annotation: Domain name=Asp; Domain location=1-140; Score= -154.8; E_value=0.00018; Accession=PF00026.14; Description=Eukaryotic aspartyl protease
MKQSCFDFTKVDAVLLPIVFLLVRPNVGKSALFNRIIASLRANQLCERLPSPNGESTVDCHQISKMPNLAFTIANKTFTLTPEQYIVKLEQAGQTICISGFMSFDVPPPRGPLWILGDVFMGVYHTVFDFGENMIGFAKSA

SEQ ID NO: 79403 - protein, 223 aa, Zea mays
  Coding DNA Sequence Number=SeqID_37624
  Homolog annotation: Hit_ID=P42211; Match level="QueryCoverage=32%, HitCoverage=14%, E-value=6e-33, Identity=90%"; Hit description =Aspartic proteinase precursor
  Subcellular localization annotation: CTP_CleavageSite=17; ConfidenceScore=5.28e-01
MAGRTAPASLPSFSLTPDSLAAPLSWISSWTLPRPTIDIMSKFFKLMVVLQLMNDLNEVFKMPLSLVLRLIVCLRFFDLSIIPLRYWNKRIIASLRANQFCERLPSPNGESTVDCHQISKMPNLAFTIANKTFTLTPEQYIVKLEQAGQTICINGFMAFDVPPPRGPLCYAKHICTTLKCAMRASTEGITVPPLAPSTPAPVCIRPLRLPAMAASLPHVYDDN

SEQ ID NO: 79404 - protein, 100 aa, Zea mays
  Coding DNA Sequence Number=SeqID_37625
MPNNGGSLANMWGRASAKPKPPSTTNSTAVESVAEADGDSSDDEQGIKYKRESTNANNRKRRAVFDFSDDEEVDNIISIASPEVPKQHTPDPIIETAEDT

SEQ ID NO: 79405 - protein, 124 aa, Zea mays
  Coding DNA Sequence Number=SeqID_37626
MPNNGGSLANMWGRASAKPKPPSTTNSTDVESVAATLDAQICAKEEADGDSSDDEQGINRFDFVVLAFSASRFFRSCHTGTPSRLRLSGSGQSGLRRAVLDLIASSRASGHPVENHMRLDMYGN

SEQ ID NO: 79406 - protein, 374 aa, Zea mays
  Coding DNA Sequence Number=SeqID_37627
MHGDLFYLTIVEAPILGNSKVCYKGAVCYCSAARFVTAPQQDLLVSSKHGAGNKSEKDNSTFLDKDGNALVVKEQSIDAHASKSRAQNGKTMPNNGGSLANMWGRASAKPKPPSTTNSTAVESVAATLDAQICAKEEVDGDSSDDEQGIKYKGESTNANNRKRRAVFDFSDDEEVDNIISIASPEVPKQHTPDPVIETAEDTKVNQKNLENKDDLPNTEKGSSMGVDSDFTSECKTKTVNTMNHSRITLKENSSDPPVSNKKQDSAVEPASTAPKRRKVFKTRIDERGREEEKYLQGDRRGGDGRGDAEAELGLWCSGAAFWRRRDGELGGGGTEADEIGQGSDAAKLAKRGERATGRRARAVARRRFFVAVAQ

SEQ ID NO: 79407 - protein, 84 aa, Zea mays
  Coding DNA Sequence Number=SeqID_37628
MPRKSGESAHGCAEIASWVTVLSYRVHQTVSYTRESTHTWETAGGPQSSVVQAQSASQTGSQVARGVRGRFNRPGGWFNRSWPV

SEQ ID NO: 79408 - protein, 151 aa, Zea mays
  Coding DNA Sequence Number=SeqID_37629
MELAIQLGKGWWWQVSPMVFDPVTSSWAPRPRVDQNQASWRLAKDSVVGSEMGGEVWYRNKGTSCFSYLVSHNPCHLKQRGYATIEWLRIGLLFLKVTLGTGFQSVKSTFVFRRIRFRPTVNIPLIPLLSHPDLRDKAGCISYMRQRRQHI

SEQ ID NO: 79409 - protein, 153 aa, Zea mays
  Coding DNA Sequence Number=SeqID_37630
MATASLTWFAERDERRDATQFYNLGEREPSPGRFRSTVNIPLIPLLSHPGFGAPRLGREHNHQEVIKDTTCLGLEIPGKAQQITAIHAPINGHEPITFTSPTLTAAPPLPRLTTCRSHAVRPIWAPTTSIEGPTHNSDDGETDKGLTVGRDGT

SEQ ID NO: 79410 - protein, 346 aa, Zea mays
  Coding DNA Sequence Number=SeqID_37631
MPRKSGESAHGCAEIASWVTVLSYRVHETVSYTRESTHTWETAGGPQSSVIQAQIRSPIPKVTLGTGFQSVKSTFVFRRKRFRPTVNIPLIPLLSHPGFGAPRPGCEHNHQFIGSSNAGIPHMTAIAAKSSQGPPYTDHSLTALAPFGKPTATALPGRAALQATSPPYGAGSTAHDLSSSHRPQDGGAPIQRWSHAGEAVPGNARAPFPNSKTSTRRLNDSASIRGTYHGFKMAGRFGHGAERVGGKEVAPTSNSGGPEHDIAQEKTLSCPTRHGEAPRTGCRGRNDTESGSPPRGGFRNSSLPRRTAQDKLGVDAVESEGGIVGGDGDPAMCSRLPTPTARRRWP

SEQ ID NO: 79411 - protein, 359 aa, Zea mays
  Coding DNA Sequence Number=SeqID_37632
MPRKSGESAHGCAEIASWVTVLSYRVHETVSYTRESTHTWETAGGPQSSVIQAQIRSPIPKVTLGTGFQSVKSTFVFRRKRFRPTVNIPLIPLLSHPGFGAPRPGCEHNHQFIGSSNAGIPHMTAIAAKSSQGPPYTDHSLTALAPFGKPTATALPGRAALQATSPPYGAGSTAHDLSSSHRPQDGGAPIQRWSHAGEAVPGNARAPFPNSKTSTRRLNDSASIRGTYHGFKMAGRFGHGAERVGGKEVAPTSNSGGPEHDIAQEKTLSCPTRHGEAPRTGCRGRNDTESGSPPRGGFRNSSLPRRTAQDKLGVDAVESEGGIVEEMATRRCVLGFPHQRHDGAGHKYGWQRSSFHRRC

SEQ ID NO: 79412 - protein, 205 aa, Zea mays
  Coding DNA Sequence Number=SeqID_37633
MASNDALPSPTAEMRPLPLPEEVVPMYLRPAPSTSPPFYENAANLLNLAPPPPYQPSPACLLSQSKVNFEDLIITSLVEMWNTIVGCTFSRRRKPWPQITQITNIADAVEGRINVTCSNGLMLRCLLRENLPLLSSSQVDSEREFFSRGIKRVCTKILQLDITAIVEESLDFSTEVMDLAAEELLEIVPLGKGFFLANYPISNLD

SEQ ID NO: 79413 - protein, 137 aa, Zea mays
  Coding DNA Sequence Number=SeqID_37634
MVRADRTRDNGQDLQGISIPHSDYPTNGNDALPPPHAARGRDPAWLPHQRCPSFPRLPRCHAAFNAGSRPMASNDALPSPTAEMRPPPLPEEVVPMYLRPAPSTSSPFYENAANLLNLAPPPPYQPSPAWCLDVVPR

SEQ ID NO: 79414 - protein, 175 aa, Zea mays
  Coding DNA Sequence Number=SeqID_37635
MEHNADRTPLIDISNTSITGDQIGSNSLGPIDDANERKRQRDRERYATMSIEQKNEKNRKRREARQRNKGLPLKSESSRGPIKNTPSAGNSIERKRQRDRERRATMSVEQRNEYNNKRRQMRQRNKGQNVMPDVSGDGDKKENVDPDDDSDWLHRNETFQSNDYVATTDLLPPGS

SEQ ID NO: 79415 - protein, 349 aa, Zea mays
  Coding DNA Sequence Number=SeqID_37636
  Homolog annotation: Hit_ID=Q1EPC6; Match level="QueryCoverage=24%, HitCoverage=5%, E-value=2e-09, Identity=38%"; Hit description=DNA helicase homolog, putative
MSIEQKNEKNRKRREARQRNKGLPLKSESSRGPIKNTPLAGNSIERKRQRDRERRATMSVEQRNEYNNKRRQMRQRNKGQNVMPDVSGDGDKKENVDPDDDSDWLHRNETFQSNDYVATTDLLPPGSVHESVGVIGEPSIGVREYRLERLRLYNQTPKRKEAKIEYVRKRRVLQADTLNVASIAMEDPTYTPEVVHPATEPSTVTTCDWVIPEFIRTPFLPAQTQTEDVGSFDMSTEAIRHKHHVPRGERQAILARRNKQFQASIARNVTTLNGDTIGDANNNDDDDDDEAVIFEEDDDNDEGYIFAGQCTYVNFYYDYDTKAYINTHVLVVVFQKISDEETDEDIEID

SEQ ID NO: 79416 - protein, 1469 aa, Zea mays
  Coding DNA Sequence Number=SeqID_37637
  Gene Ontology: Mol. function=helicase activity; Biological process =viral genome replication
  Homolog annotation: Hit_ID=Q1EPC6; Match level="QueryCoverage=84%, HitCoverage=79%, E-value=0.0, Identity=68%"; Hit description=DNA helicase homolog, putative
MEHNADRTPLIDISNTSVTGDQIGSNSLGPIDDANERKRQRDRERYATMSIEQKNEKNRKRREARQRNKGLPLKSESSRGPIKNTPLAGNSIERKRQRDRERRATMSVEQRNEYNNKRRQMRQRNKGQNVMPDVSGDGDKKENVDPDDDSDWLHRNETFQSNDYVATTDLLPPGSVHESVGVIGEPSIGVREYRLERLRLYNQTPKRKEAKIEYVRKRRVLQADTLNVASIAMEDPTYTPEVVHPATEPSTVTTCDWVIPEFIRTPFLPAQTQTEDVGSFDMSTEAIRHKHHVPRGERQAILARRNKQFQASIARNVTTLNGDTIGDANNNDDDDDDEAVIFEEDDDNDEGYIFAGQCTYVNFYYDYDTKAYINTHVLVVVFQKISDEETDEDIEIDGTQDESTGTDVPDPYDKVYSNLPEETHMLKPVPDCGYCTAKKFEYEPPGFCCRGGKVELAPLDTPPQLRRLWDSADSDAKHFRDNIRFFNGHFSFTSLYCCLDSMTTNVRDSGIYTFRAQGMMYHNIKSFGKEGGSEHKHLELYFYDDDPSLEHRYRKCREEQLQKDKDVIKQIVGILHGNPYSEHLRSMGHVENLDDYHIALNLDQTLNQKTYNTPLTSEVAAVWIEGSERRGQFSKSVMLHGKDRSSHGIRSYHGCYDALSYPLFFPKGELGWHANIPKVGVSMDEVDAYRATHRANNSNDEDAESPTHLCVSVRDYYCYKFQIRPGVFNPILHGKRLFQQFAVDTYIKIESSRLDFIRKNQDRLRADLYQGLVDSMLDGDIRAEKVGKRTVLSTSFIGGPRDMKRRYMDAMALVRKFGKPDIFLTMTCNPNWDEIRRELLPGQTPQDRPDLVVRVFHAKLQELKHRLTKQDILGKVRAYVYVVEFQKRGLPHAHFLLIMQRKYKLTCPEQYDLLISAEIPHNKYPELRKMVIKHMMHGPCGSLNPNCPCTKGHVSCKNHYPRPFSDTTLQGKDSYPIYRRRDDGRKEKVRGCELDNRWVVPYNPYLLRLFNCHINVEACGSIKAVKYLFKYIYKGHDRASVVMRDASKADDDVDEIKQYRDARWVTPPEALWRIYGFELSQNSPPVMQLQLHLPNMHMVAFHERQMVERVVNRPGADRSMLTAYFEANRLHEGARGILYRDFPEWYTWQSGKGKVWQRRKRDTGGQVGRIVSAHPAEGERYYLRVLLNHVTCATSYVDLRTVDGVPLPTFREAAERRGLLESDNTLDDCLTERALFQMPLALRRLFATILVYCEPSDMAVLWQNHLDVMSEDYQHRSQGKTHVEQMSMGKDIKTFPLPPIIDAYDDAIGTAREVYEEESIEPAVGDVALKDSLNEEQRVAYDKILSAVDTDKGGLFFVDGPGGTGKTYLYRVLLATLRSQGKIAVATATSGVAASIMPGGRTAHSRFKIPLTIDDGAVCSFTKQSGTAELLRKASLIIWDEASMTKRQAVEALDNSMRDIMGRPELPFG

SEQ ID NO: 79417 - protein, 204 aa, Zea mays
  Coding DNA Sequence Number=SeqID_37638
  Homolog annotation: Hit_ID=Q6S563; Match level="QueryCoverage=31%, HitCoverage=20%, E-value=4e-16, Identity=76%"; Hit description =Putative ribokinase
  Pfam annotation: Domain name=DUF789; Domain location=17-150; Score= -171.9; E_value=0.0029; Accession=PF05623.3; Description=Protein of unknown function (DUF789)
MARRRPGSTVADPCGGTEGGGVGEVKERPASAQMREGGRGRVGFWAQVAGGGAVASSTRDVGAESTAARSSGDDCDPPTLACPGFGGINRGKTAAGKLSLPIFGLAPYKLRASIWTSDKTQERDRVTSLMQEADSWLRTIQVSIVESNHILNEVNTHILPSHNDLTPITTIAGGSVANTIRGLSAGFGISTGDYCLSTIRALVV

SEQ ID NO: 79418 - protein, 237 aa, Zea mays
  Coding DNA Sequence Number=SeqID_37639
  Homolog annotation: Hit_ID=Q7XIV4; Match level="QueryCoverage=20%, HitCoverage=11%, E-value=7e-22, Identity=93%"; Hit description =Putative alpha-galactosidase
  Pfam annotation: Domain name=DUF789; Domain location=43-237; Score= -161.8; E_value=0.00052; Accession=PF05623.3; Description=Protein of unknown function (DUF789)
MTDIADKNNKWASYVGPGGWNDPDMLEVGNGGMTLAEYRSHFSIWALMKIKAKTISEIHSEAEKNLGLCPGAASVIRNGRSSPGGPLSPGGGFPMNRPGTRGMMPGMPGSRKMPGMPGLDDQIRRKLCNMQADIRIPVSNRAIELNNGSYVCISIRLGSSDCDPPTLACPDFGGINHGTTAAGKLSLPIFGLAPYKLRASIWTSDKTQERDRVTSLMQEADSWLRTIQVQRGDDLWL

SEQ ID NO: 79419 - protein, 550 aa, Zea mays
  Coding DNA Sequence Number=SeqID_37640
  Homolog annotation: Hit_ID=Q6AU54; Match level="QueryCoverage=63%, HitCoverage=67%, E-value=3e-74, Identity=48%"; Hit description =Expressed protein
MAFNTNYEIVFLIISGMMRTIWSPDGPNKIHPDVDLTAPDAGRPDDDPAWFCLRVGCDQSHERVDPEALDRSFFMRVMAARSPNVRLQKAIDRKNQRFIVRILILTQLDAEMLALCAAEASESSTARVECPSERKKALTTPQSKVVRPRQELFHNVKHQTESLAAAARKGTVVKSLFMSTTPKKEPVQTPVADKSKGAVSEVCSKLRKLNLACREVPSRYISQPQPKNTKTAKKSEETTVAKSEKRELESKTNAKKKILGRSVKRANAGPDGENRNGCSTAADENSLAETAGSHQERKVVLQELRIEVDASRRGNLDDNKENVSSALSEEALDNSSHYGSENILLENNENVPLKENVALKVAKLQKKVHQEQAGKLKKTTNPRVLWDGGQYDPALWASKVGNSWRTTDDITDTWKSMTDIADKNNKWASYAGPGGWNDPDMLEVGNGGMTLAEYRSHFSIWALMKIKAKTISEIHSEAEKNLGLCPGAASVIRNGRSSPGGPLSPGGGFPMNRPGTRGMMPGMPGSRKMPGMPGLDGRWCLLLYLMVDPK

SEQ ID NO: 79420 - protein, 116 aa, Zea mays
  Coding DNA Sequence Number=SeqID_37641
  Gene Ontology: Mol. function=metal ion binding; Cellular component =integral to membrane
MVRQTAMVVKCLLLMYYKNSRGRSYRRQGQMLTIVEYFLLLYRALLPTPVWYRFFLNKEYGSLFSSLTTGLYLTFKLTSVVEKGNGCNFPIGKGWCVAAKERTSCLCARKKDAKDL

SEQ ID NO: 79421 - protein, 143 aa, Zea mays
  Coding DNA Sequence Number=SeqID_37642
  Gene Ontology: Mol. function=metal ion binding; Cellular component =integral to membrane
MVRQTAMVVKCLLLMYYKNSRGRSYRRQGQMLTIVEYFLLLYRALLPTPVWYRFFLNKEYGSLFSSLTTGLYLTFKLTSVVEKTIENERILYHVFPLYLTMVVTYMFAFWGNGCNFPIGKGWCVAAKERTSCFCARKKDAKDL

SEQ ID NO: 79422 - protein, 137 aa, Zea mays
  Coding DNA Sequence Number=SeqID_37643
MGIRENLTGKDWLEAAKSLLSLGAPDCPVVRQAGSGELAALGTSTAAYGYKSPDCPSEFEKIPRFEFLGCYKSTPLKRNLVLEIRLRRVMGIALLQLHIFTLQLFEEMELQQDLVLRSIWLPIANADSGYSRSSSGF

SEQ ID NO: 79423 - protein, 161 aa, Zea mays
  Coding DNA Sequence Number=SeqID_37644
MAHSAAEGTLRRGGTGEDAGQGEEDGAVPNFPVRQDGRGEDGGDDRRNYERTDERSNDRTNERSKFWQHNGRTKSEFEKISGFEFLGCYKSTPLKRNLVLEIRLRRVMGIALLQLHIFTLQLFEEMELQQDLVWRSIWLPIANADSGYSKIIFRLQLSLGS

SEQ ID NO: 79424 - protein, 433 aa, Zea mays
  Coding DNA Sequence Number=SeqID_37645
  Gene Ontology: Mol. function=inositol or phosphatidylinositol phosphatase activity; Biological process=vascular tissue development (sensu Tracheophyta)
  Homolog annotation: Hit_ID=Q6ZK18; Match level="QueryCoverage=95%, HitCoverage=37%, E-value=0.0, Identity=76%"; Hit description =Putative inositol 1,4,5-trisphosphate 5-phosphatase
  Pfam annotation: Domain name=WD40; Domain location=133-186; Score =14.8; E_value=0.32; Accession=PF00400.22; Description=WD domain, G -beta repeat
  Pfam annotation: Domain name=WD40; Domain location=189-225; Score =7.9; E_value=4.3; Accession=PF00400.22; Description=WD domain, G -beta repeat
  Pfam annotation: Domain name=WD40; Domain location=228-264; Score =7.9; E_value=4.4; Accession=PF00400.22; Description=WD domain, G -beta repeat
  Pfam module annotation: Pfam domain module=WD40::WD40::WD40; Domain location=133-186::189-225::228-264
SEGGAIKAWPWEALAKCLSSTPEEIHEAASLVEKSYIDLRNHATVGNMCSLPTADVKHMLADHCRLKVWSVTSMTFALWDAKTRELLKVFGIDGQVDLARPEAPVMPEQFIEEEIKAKPTKKEKLQGSLSFFRKSRNALMGAADAVRRVATKGTFVEDNRRTEAVAQAMNGTIWSGCTDGSIIVWDGNGNRLQEFHYHSSSVQCIEALGERIWVGYASGTIQVMDVEGNLQAGWIGHSCPVISMAVGDSYIFSLAHHGGIRGWSLSSPSPLDDILRYELASRELSYTRLENLKILVGTWNVAQEKACPEALKSWLGGAFFDVGLVVVGLQEVEMGAGVLAMAAAKESVRLEGSTNGQWWIDSIGKTLDEGISFHRVGSRQLAGLLIAAWARNDLKPHVGDVDAAAVPCGFGRAIGNKVPGIICLVCLLPLGIP

SEQ ID NO: 79425 - protein, 1139 aa, Zea mays
  Coding DNA Sequence Number=SeqID_37646
  Gene Ontology: Mol. function=inositol or phosphatidylinositol phosphatase activity; Biological process=vascular tissue development (sensu Tracheophyta)
  Homolog annotation: Hit_ID=Q6ZK18; Match level="QueryCoverage=99%, HitCoverage=99%, E-value=0.0, Identity=69%"; Hit description =Putative inositol 1,4,5-trisphosphate 5-phosphatase
  Pfam annotation: Domain name=Exo_endo_phos; Domain location=573-908; Score=163.6; E_value=5.2e-46; Accession=PF03372.13; Description =EndonucleaseExonucleasephosphatase family
  Pfam annotation: Domain name=WD40; Domain location=412-465; Score =14.8; E_value=0.32; Accession=PF00400.22; Description=WD domain, G -beta repeat
  Pfam annotation: Domain name=WD40; Domain location=468-504; Score =7.9; E_value=4.3; Accession=PF00400.22; Description=WD domain, G -beta repeat
  Pfam annotation: Domain name=WD40; Domain location=507-543; Score =7.9; E_value=4.4; Accession=PF00400.22; Description=WD domain, G -beta repeat
  Pfam module annotation: Pfam domain module=Exo_endo_phos::WD40::WD40:: WD40; Domain location=573-908::412-465::468-504::507-543
MDPDDESAAQRKAADLHLPRVTEPASAPARTFCAAQRVLSYGDGPVASASAQRCASFPQRHGHGHGHGEAALAPAASFAAWVDGGPTPPSAVAAALERAMSQYDGAGDALPEFVGAGGGEGIFRVPLRAAVHPARPPPLEVRPHPLRETQVGAFLRTLVCDPRRRKLWAGAESGVRVWCLDEVFRGWWPGAGPRRRGDEEAAPFRDSVPVPPALCAAVDSANGLVWTGHREGRIRAWRVDHAAPAGGDPTGSAAMFKEAFAWQAFSRTPVLAIVVTPYGSEGGAIKAWPWEALAKCLSSTPEEIHEAASLVEKSYIDLRNHATVGNMCSLPTADVKHMLADHCRLKVWSVTSMTFALWDAKTRELLKVFGIDGQVDLARPEAPVMPEQFIEEEIKAKPTKKEKLQGSLSFFRKSRNALMGAADAVRRVATKGTFVEDNRRTEAVAQAMNGTIWSGCTDGSIIVWDGNGNRLQEFHYHSSSVQCIEALGERIWVGYASGTIQVMDVEGNLQAGWIGHSCPVISMAVGDSYIFSLAHHGGIRGWSLSSPSPLDDILRYELASRELSYTRLENLKILVGTWNVAQEKACPEALKSWLGGAFFDVGLVVVGLQEVEMGAGVLAMAAAKESVGLEGSTNGQWWIDSIGKTLDEGISFHRVGSRQLAGLLIAAWARNDLKPHVGDVDAAAVPCGFGRAIGNKGGVGLRIRVFDRRICFVNNHFAAHQENVSRRNADFDHIYRTMTFNKPHGSTASATSVQLHKAANENQADEDRPELAEADMVVFLGDFNYRLDGITYDEARDMVSQRSFDWLRERDQLRAEMEAGNVFQGMREGRIKFPPTYKFQRHQMGLSGYDSGEKKRIPAWCDRILYRDSRSVSMPECSLECPVVAAITAYEACMDVTDSDHKPVRCTFSVDIARVDELIRRQEYGKIVESNKRVHSLLRELHFVPDTIVSTNNIILENQEDVILRITNNCETSKAAFEILCEGQSIRKQDGTKSEPVIRASFGFPLWLEVQPSSGLIGPGDTTEVAVHHEDFFTQEEFVDGVQQSWWCETTRDIEVVLSVNVTGVASTEAATHRITVRHCCPAPPAPPSANPRGPITDSPSDAVPGPKSSQSNHLLRSDFANFGSSEVRDLCGVRKRNL

SEQ ID NO: 79426 - protein, 712 aa, Zea mays
  Coding DNA Sequence Number=SeqID_37647
  Gene Ontology: Mol. function=inositol or phosphatidylinositol phosphatase activity; Biological process=vascular tissue development (sensu Tracheophyta)
  Homolog annotation: Hit_ID=Q6ZK18; Match level="QueryCoverage=97%, HitCoverage=59%, E-value=0.0, Identity=65%"; Hit description =Putative inositol 1,4,5-trisphosphate 5-phosphatase
  Pfam annotation: Domain name=WD40; Domain location=412-465; Score =14.8; E_value=0.32; Accession=PF00400.22; Description=WD domain, G -beta repeat
  Pfam annotation: Domain name=WD40; Domain location=468-504; Score =7.9; E_value=4.3; Accession=PF00400.22; Description=WD domain, G -beta repeat
  Pfam annotation: Domain name=WD40; Domain location=507-543; Score =7.9; E_value=4.4; Accession=PF00400.22; Description=WD domain, G -beta repeat
  Pfam module annotation: Pfam domain module=WD40::WD40::WD40; Domain location=412-465::468-504::507-543
MDPDDESAAQRKAADLHLPRVTEPASAPARTFCAAQRVLSYGDGPVASASAQRCASFPQRHGHGHGHGEAALAPAASFAAWVDGGPTPPSAVAAALERAMSQYDGAGDALPEFVGAGGGEGIFRVPLRAAVHPARPPPLEVRPHPLRETQVGAFLRTLVCDPRRRKLWAGAESGVRVWCLDEVFRGWWPGAGPRRRGDEEAAPFRDSVPVPPALCAAVDSANGLVWTGHREGRIRAWRVDHAAPAGGDPTGSAAMFKEAFAWQAFSRTPVLAIVVTPYGSEGGAIKAWPWEALAKCLSSTPEEIHEAASLVEKSYIDLRNHATVGNMCSLPTADVKHMLADHCRLKVWSVTSMTFALWDAKTRELLKVFGIDGQVDLARPEAPVMPEQFIEEEIKAKPTKKEKLQGSLSFFRKSRNALMGAADAVRRVATKGTFVEDNRRTEAVAQAMNGTIWSGCTDGSIIVWDGNGNRLQEFHYHSSSVQCIEALGERIWVGYASGTIQVMDVEGNLQAGWIGHSCPVISMAVGDSYIFSLAHHGGIRGWSLSSPSPLDDILRYELASRELSYTRLENLKILVGTWNVAQEKACPEALKSWLGGAFFDVGLVVVGLQEVEMGAGVLAMAAAKESVGLEGSTNGQWWIDSIGKTLDEGISFHRVGSRQLAGLLIAAWARNDLKPHVGDVDAAAVPCGFGRAIGNKVPGIICLVCLLPLGIP

SEQ ID NO: 79427 - protein, 145 aa, Zea mays
  Coding DNA Sequence Number=SeqID_37648
MGAGLDPSPSFGGCSDPVLVELSMGGDYYRACCGEPDSDIPEGPKLPCVGDKTCTDLVQILVVAVCTALGGSDSAAAQLSVGYLVFKLCWSLFPLQQPSFSLGSPILQEKIKEHILERQDKAEVDHIMVKIEECKKEDTPVSWIY

SEQ ID NO: 79428 - protein, 151 aa, Zea mays
  Coding DNA Sequence Number=SeqID_37649
  Gene Ontology: Mol. function=carbonate dehydratase activity; Cellular component=nucleus; Biological process=one-carbon compound metabolic process
  Homolog annotation: Hit_ID=Q6ZD39; Match level="QueryCoverage=24%, HitCoverage=4%, E-value=3e-12, Identity=91%"; Hit description =Putative ARF GTPase-activating domain-containing protein
  Subcellular localization annotation: CTP_CleavageSite=38; ConfidenceScore=5.52e-01
MALARAYERRTQFSDGCPQPSPRLPVAPSPTSTGPATAASALVAPTFKRLTPTEMAERRRQGLCYNCDKPFVRGHHWQRLFYLEVSTDDDGVAAAEDPHPRNLAFQLEAKLFLEVEHMLNDRLLNFVDIDLHDVKDAHKRFDKASLSYDQT

SEQ ID NO: 79429 - protein, 139 aa, Zea mays
  Coding DNA Sequence Number=SeqID_37650
  Gene Ontology: Mol. function=protein binding; Cellular component =cytoplasm; Biological process=regulation of GTPase activity
  Homolog annotation: Hit_ID=Q6ZD39; Match level="QueryCoverage=88%, HitCoverage=17%, E-value=2e-48, Identity=89%"; Hit description =Putative ARF GTPase-activating domain-containing protein
IQSLEESAELLRERCLKFHKRLPEGLGEAYDGDIAFASSLETFGGGHNDPISVAFGGPVMTKFTIALREIGTYKEVLRSQVEHMLNDRLLNFVDIDLHDVKDAHKRFDKASLSYDQIREKYLSLKKGHFTFPCRGKEEI

SEQ ID NO: 79430 - protein, 1143 aa, Zea mays
  Coding DNA Sequence Number=SeqID_37651
  Gene Ontology: Mol. function=GTPase activator activity; Cellular component=cytoplasm; Biological process=regulation of GTPase activity
  Homolog annotation: Hit_ID=Q6ZD39; Match level="QueryCoverage=92%, HitCoverage=94%, E-value=1e-170, Identity=70%"; Hit description =Putative ARF GTPase-activating domain-containing protein
  Pfam annotation: Domain name=Ank; Domain location=1050-1082; Score =32.6; E_value=1.4e-06; Accession=PF00023.20; Description=Ankyrin repeat
  Pfam annotation: Domain name=Ank; Domain location=1083-1115; Score =30.3; E_value=6.9e-06; Accession=PF00023.20; Description=Ankyrin repeat
  Pfam annotation: Domain name=ArfGap; Domain location=817-954; Score =185.0; E_value=1.8e-52; Accession=PF01412.9; Description=Putative GTPase activating protein for Arf
  Pfam module annotation: Pfam domain module=Ank::Ank::ArfGap; Domain location=1050-1082::1083-1115::817-954
MGAGLDPSPSFGGCSDPVLVELSMGGDYYRACCGEPDSDIPEGPKLPCVGDKTCTDLVQILVVAVCTALGGSDSAAAQLSVGYLVFKLCCEGLGEAYDGDIAFASSLETFGGGHNDPMSVAFGGPVMTKFTIALREIGTYKEVLRSQRQVQDSQTLIINHLSAVAAQLVAIEVQLASASSVIDPSSSSHVFPSTAQDYPYGLPDNGGIPTAPAPVPFLPMALPPSATPALVPTTSHAAAAPSSTVVLVSTASIHPSAPCPSTEFPSPTPHPQPQAFPTSTIVHTSHNSTLTTCTTITFSSQLRWQGRSCWLGCPAVRASSTIRGHRRWTKSGWLRTISRALHNSGPLCCGATIPHCTGRASKLCANNVLGLPYAAIRWARWHACRSDQNRFLALLCHTEPMPPPHQQAQLFTTGLFGHLRMDVELCAPDDLQQDMALARAYERRTQFSDGCPQPSPRLPVAPSPTSTGPATAASALVAPTFKRLTPTEMAERRRQGLCYNCDKPFVRGHHWQRLFYLEVSTDDDGVAAAEDPHPRNLAFQLEAKLFLEVEHMLNDRLLNFVDIDLHDVKDAHKRFDKASLSYDQIREKYLSLKKGTRPDITTAIEDELHSARSSFEQARFNLVTSLSHVEAKKRFEFLEAVSATMDSHLRYFKQILAYAQQSRERANKEQASLVERMHEYKRQIDRESRSSINGLNDSYNGDRMQTIGRSSHKQIEAVMQSTSKGKAESAVDQMDWIEKITGVIASLLSSQSPEQCFMSSPKGSGHDRSTSDGSSFTSSVEFEPSVIDDLVLEKYSGNGQHDVIRGTHHHRTSMKPEKPIDLLRKVDGNNMCADCGALEPDWASLNLGALLCIECSGVHRNLGVHISKVRSLTLDVRVWEPSVINLFQSLGNMFVNNIWEDMLPDDNSSADGSDTSQYLSVSKPKHKDVFSAKEKFIHAKYVDKEFIRKRSMDENQLAEQMWNSVAANDKKTAYSLIVRSRANVNLVYGEMPSSPFLTLGKALQQEQPVSPPDGSPKFFDCNSHDKISPREPLSPASTSSRTDDMEDGCEGLSLLHLACRVADVGMVELLLQYGASVNMNDSRGRTPLHHCILKGRHRHAKLLLSRGADSQAMDRDGRTALQYAIDGGTSDEDILALLEDHSR

SEQ ID NO: 79431 - protein, 217 aa, Zea mays
  Coding DNA Sequence Number=SeqID_37652
  Gene Ontology: Mol. function=oxidoreductase activity, acting on the CH-OH group of donors, NAD or NADP as acceptor
  Homolog annotation: Hit_ID=Q8LN38; Match level="QueryCoverage=64%, HitCoverage=21%, E-value=4e-27, Identity=49%"; Hit description =Putative glyoxylate reductase
MELPLDAQSSGRRLDVDERVEQCRAVAGVLHVLARSVQVLQMQHLRGEEGESSGGGEVREMPNVLILPRSADYSKEVWMEIREKAITMLQSFFFDGVLPSSAISDEDEEISEAKNEDDYLGPQAKDSQSQIFDAEIDESHITLESEKKRAISHHKEPQASGKSVNIGSRSEGRRSRSGKKGKKRPAHRRPQQKPDDLSDVESIFKCFKIILNSINSM

SEQ ID NO: 79432 - protein, 700 aa, Zea mays
  Coding DNA Sequence Number=SeqID_37653
  Gene Ontology: Mol. function=oxidoreductase activity, acting on the CH-OH group of donors, NAD or NADP as acceptor; Cellular component =nucleus
  Homolog annotation: Hit_ID=Q8LN38; Match level="QueryCoverage=84%, HitCoverage=89%, E-value=1e-123, Identity=59%"; Hit description =Putative glyoxylate reductase
  Pfam annotation: Domain name=2-Hacid_dh_C; Domain location=90-342; Score=54.5; E_value=3e-13; Accession=PF02826.9; Description=D-isomer specific 2-hydroxyacid dehydr
MAHSPAPSGGGGGGPLPLLVSLNCLDDLSLEQEGLAGVAAVEHRRLRPWQLLLCLGSADRAADAAAAADLGLRLVHVDANRAEEVADTVMALILGLLRRTHLLSCHASSVPAAGWLGSVQPMCRGMRRCRGLVLGIIGRSAAARCLATRSLAFRMSVLYFDPRYVGLLYRLSNFSTTITTKGVFGNTVFQNHGISNTTVYKCHDMISVFNTTVLEYHGFEYMEVFGNKASGKTKRPSIVFPSAARRMDTLNDLLAASDLISLHCGLTNETMHILNADCLQHIKPGAFIVNTGSCQLIDDCALKQLLIDGTIAGCALDGAEGPQWMEAWVREMPNVLILPRSADYSEEVWMEIREKAITMLQSFFFDGVLPSSAISDEDEEISEAKNEDDYLGPQAKDSQSQIFDTEIDESHITLESEKKRAISHHKEPQASGKSVNIGSRSEGRRSRSGKKGKKRPAHRRPQQKPDDLSAVESDSNYSSRRDDDTAMSSRDQVVSSSSRFASPEDPKYKHKSLSESPMEITSEKKVPVLLSRKYPDKLKDGFIVALRARDNSGYHVARQRVVGGGGWILDVVSNATNRDPAAQFLVTFKNKINRKMEFVFASHSFDVWESWMLDGSLLEVMVVEVVLAGGGGSMLVRLEVKVSTCSRGWPHLEEARGVIIGAERGKHGKRSTVTDSPSEDVRSHEMRKISLFHGWKEIGD

SEQ ID NO: 79433 - protein, 215 aa, Zea mays
  Coding DNA Sequence Number=SeqID_37654
  Gene Ontology: Mol. function=nucleoside-triphosphatase activity; Cellular component=nucleus; Biological process=protein transport
  Homolog annotation: Hit_ID=Q9LZF6; Match level="QueryCoverage=86%, HitCoverage=66%, E-value=9e-66, Identity=50%"; Hit description=Cell division control protein 48 homolog E
MMLQCKRQLYRKEKKVYSTAILERKRSMNRLVVDEATNDDNSVVALHPDRGCTLPRRYCAPQEIEYAEAVRCQDVKYGKRVHILPIDDTVEGITGNLFDAFLKHTEIFCDGEPIKREDEERLDEVGYYDVGVRKQMAQIRELVELPLRHPQLFKSIGVKPPKGILLYRPPSSGKTLIARAVADDTGAFFFLINGPEITKFICIDRITNGLQIFFS

SEQ ID NO: 79434 - protein, 218 aa, Zea mays
  Coding DNA Sequence Number=SeqID_37655
  Homolog annotation: Hit_ID=Q9LZF6; Match level="QueryCoverage=38%, HitCoverage=10%, E-value=8e-36, Identity=78%"; Hit description=Cell division control protein 48 homolog E
  Pfam annotation: Domain name=CDC48_N; Domain location=93-177; Score =51.8; E_value=2.3e-12; Accession=PF02359.8; Description=Cell division protein 48 (CDC48), N-t
  Pfam annotation: Domain name=PNK3P; Domain location=5-90; Score= -77.6; E_value=0.018; Accession=PF08645.1; Description=Polynucleotide kinase 3 phosphatase
  Pfam module annotation: Pfam domain module=CDC48_N::PNK3P; Domain location=93-177::5-90
MGCEVSMIFQEKLQRLYDDGYKLVIFTNESNIERWKNKRQQAVDSKVGRLDNFIQCVKAPIQKCIWIFHEFQSFTYPSTCYPATGREDIIKMLKKKNLGGKNPQGGGGGAAFARSRCSWRQLEYAEAVRGKKRKDTICIVLADETCEEPKVQMNKVVRQNLRVRLGDVVSVHQCEDVKYGKRVHILPIDDTIEGITGNLFDAFLKPWLHGTYFSCNFN

SEQ ID NO: 79435 - protein, 79 aa, Zea mays
  Coding DNA Sequence Number=SeqID_37656
MAERYPRTKVGIAADRNNTKLDTGPKVNSIPVLFTLTGHSLFASRLYCHFLPIEGMTFITFVRKSLYPKGNNTSEDEGY

SEQ ID NO: 79436 - protein, 112 aa, Zea mays
  Coding DNA Sequence Number=SeqID_37657
MGRLVLSSLSRCIWKYATKLPDWTFGDEADPQQRLGLFPEYFSIKICSLDDNLGKQCIHEGGMSFVTFVRKPLHPKGNNASEDEGLSQLTFSMLPCSQLIALEDKSPTELKV

SEQ ID NO: 79437 - protein, 161 aa, Zea mays
  Coding DNA Sequence Number=SeqID_37658
  Subcellular localization annotation: CTP_CleavageSite=42; ConfidenceScore=5.48e-01
MSRAARAAFVFWGGPAFAPYLDFFVGNGIACASESCFSRKVMSEVSVSRRCRSPSARSALPLTRTLTRPWGYVTDAVKKARRIASAEELPNVKTCSVRGIAYPNVSYLSQKVMSEVSISRRHRSPSARSALAAYVYSVVFRICWGLVLKCYELRTRQHRKC

SEQ ID NO: 79438 - protein, 180 aa, Zea mays
  Coding DNA Sequence Number=SeqID_37659
CSRPIDAVLEDLLDLWVRTHTCFRCATPILLVDVDRIVFIGVLTDLEELEVAKWIGASGKNSEKRQNPQGIKEGGAINDEIDEALSPNRNGKDGASKGRFKVMVIANKDTAQDGIKTKLVRRQGGERNQGRDRWNVSISQGSEAVIDKGIREKTKAQKSQWYTYNKEWRYVKAYAVKKRI

SEQ ID NO: 79439 - protein, 102 aa, Zea mays
  Coding DNA Sequence Number=SeqID_37660
MEVSHRGRRPSPEPRRNPSIAGDSGIQSMKRTRCDEAFDETNAAVPSDSADDARIGRLAANPLNKSIDTHLMKMLPTLILTDLEELEVANRTGVRGKNNEKR

SEQ ID NO: 79440 - protein, 158 aa, Zea mays
  Coding DNA Sequence Number=SeqID_37661
MEERGGEGGCAREDETGPAGGGRGRTGRAGRGHSRRGGVRAGAGARDAGATAAAAGEGERGAVEEGKQRGGGAPPPGKVRGEWERLCTDGKTKKRRNPRCNNGGFSPGKKTLAGAEEKSVDCRRFGDPIDEPNALRRSLRRDERSGTLGFRRRCTDWE

SEQ ID NO: 79441 - protein, 655 aa, Zea mays
  Coding DNA Sequence Number=SeqID_37662
  Gene Ontology: Mol. function=cysteine-type peptidase activity; Biological process=proteolysis
  Homolog annotation: Hit_ID=Q109R5; Match level="QueryCoverage=69%, HitCoverage=37%, E-value=5e-48, Identity=29%"; Hit description=Ulp1 protease family, C-terminal catalytic domain containing protein
  Pfam annotation: Domain name=Peptidase_C48; Domain location=209-430; Score=50.9; E_value=4.3e-12; Accession=PF02902.9; Description=Ulp1 protease family, C-terminal catalytic domain
MARNGSHMELSALSACLAAVVCSSQQPPLRPLGSAAGDGTSLIIKAVLDRATELLADAHSAANYIRSARSLWHASFDAFFGLLTRYCDSKYESIMQRFAMQGSNSMGGPETTKAVSREMPVELLRASLPHTNEQHRQTLLDFARKSTHLPGFSPTANRGLVNSESVPVLNITSVEFGDYICTQGDLALIDWIKEIPCEPRVEVVLIDDAFVERKWMECLFQPDAYLGDEVIDCYINLIKAQEHLKCRSGGRVHIENAFQFNFLKRDGDVETKTDELYPSKDMAQISSAERRVLLYLDHDMVFIPINIREMHWYLAVINARNMEIQVLDSLGTSSGRNDLIDTIKGLQRQIDMVSQRKELKDHRWPDLRVASWPLREIEMEYAKQTDSSSCGLFLLNYIEYWTGDELSDNFTQDDMSHFRKKLAAILLSSDINKRKGCPLYKYDKEVDAGCSSDVQILDSPTNPKKRKLPCVSEENEVLMEDDDGPITQADLERWFVHDWDKRTPIKIPTDECTNEFLLSGLSTKDMPVTKADLIDVLCDYIMTIQDDTTLEMTWVRSFNPFKIEISVKDLQNVLRVNLDMTLKCFDMAVRLLAIKESHMSKDEMIKDKKHYMDMRFWRMVGFGKLPKYHQDLKGKCALGPFLSILVIECKHKCLM

SEQ ID NO: 79442 - protein, 315 aa, Zea mays
  Coding DNA Sequence Number=SeqID_37663
MEDKDPSSLTEKLDKTFSNETTYLILDIYQAGSRNRQFIPGYPAADGLLKKTITEGKVGGRQGKRVGIDPSDCADLVKGAKDKHLRVKRLVRIPTKDDMSHFRKKLAAILLSSDINKRKGCPLYKYDKEVDAGCSSDVQILDSPTNPKKRKLPCVSEENEVLMEDDDGPITQADLERWFVHDWDKRTPIKIPTDECTNEFLLSGLSTKDMPVTKADLIDVLCDYIMTIQDDTTLEMTWVRSFNPFKIEISVKDLQNVLRVNLYMTLKCFDMAVRLLAIKESHMSKDEMIKDKNIIWTCASGFLCHGNSTDATHFS

SEQ ID NO: 79443 - protein, 428 aa, Zea mays
  Coding DNA Sequence Number=SeqID_37664
  Gene Ontology: Mol. function=cysteine-type peptidase activity; Biological process=proteolysis
  Homolog annotation: Hit_ID=Q109R5; Match level="QueryCoverage=81%, HitCoverage=28%, E-value=8e-20, Identity=33%"; Hit description=Ulp1 protease family, C-terminal catalytic domain containing protein
MEYAKQTDSSSCGLFLLNYIEYWTGDELSDNFTQDDMSHFRKKLAAILLSSDINKRKGCPLYKYDKEVDAGCSSDVQILDSPTNPKKRKLPCVSEENEVLMEDGDGPITQADLERWFVHDWDKRTPIKIPTDECTNEFLLSGLSTKDMPVTKADLIDVLCDYIMTIQDDTTLEMTWVRSFNPFKIEISVKDLQNVLRVNLDMTLKCFDMAVRLLAIKESHMSKDEMIKDKKHYMDMRFWRMVGFGKLAKYHQDPTAEELAKTLDCWPSLNYYITGCKYVLMPWKFNGCYALFIIDHGKKHVTFMDFTPTEDWCKHMPYKRFAEAIIMASKKYKIAYNKKRSGWAHDIFKWEHTIRSGLPLDLKGVNTSYFVLQAMVMWGSGRRMEFNRDTKILRRNFVIDLLSYEENSCRYAIPPNIQQRLISIAKKD

SEQ ID NO: 79444 - protein, 230 aa, Zea mays
  Coding DNA Sequence Number=SeqID_37665
  Homolog annotation: Hit_ID=Q10AY8; Match level="QueryCoverage=16%, HitCoverage=36%, E-value=1e-10, Identity=79%"; Hit description =Expressed protein
  Subcellular localization annotation: CTP_CleavageSite=15; ConfidenceScore=5.71e-01
MTRHPTTTACSTPTSAKTAPAPGYGLEQRLPNGSSKKGTPRSASQRWMPDKPRTPSSRRTYSIGEPGKLTTGFSRSARMGNLNPRDRAFASLSNIADLKSVADAATEDLDDEFDHIDESHYVDTEDSTKHKKKSPIFRRCGELAVPLTLPLTYDSDPSPSPSSSPDRFPFGRRYDVGPIVLIFLLLVLIVTSQFEWKQHIGEAEANPTATRRRQQALGREDAVKEKVVLL

SEQ ID NO: 79445 - protein, 297 aa, Zea mays
  Coding DNA Sequence Number=SeqID_37666
  Homolog annotation: Hit_ID=Q10AY8; Match level="QueryCoverage=18%, HitCoverage=50%, E-value=9e-11, Identity=62%"; Hit description =Expressed protein
MNFRPIVLIFLLLVLIVTSQFEWKQHIGEAEANPTATRRRQQALGREDAVKEKLDPGHVGTVYFSSVNFLALLLELFEYSLPFTLLLPNFIPYHLRTNAEFSKNWSTDDACAGRWAGVGCSADGRPVTSLTLPSLDLRSPLDLLSHLAELRALDLRENRLNGTLDGVENAGEVSAANATDDCRRLPFGTASIVSDGVSAADLVVKQLDELSIVDLKNLADIESPEFGMEPEPEMEEEEVPPPSTSAGPPCHQWGCTARRLGIWGSIGEASWLPTKQGAATRALDVAGGRLMLAAAAA

SEQ ID NO: 79446 - protein, 165 aa, Zea mays
  Coding DNA Sequence Number=SeqID_37667
MQQLQPKQMHWVRADSSDFGGDRPAPRSHQRHDASCEEDDLYGYGGIVNEWGTIGLLLLEAAAERIVGDGALETWGVADKATRVKLCMLGVPVGVQREGDHTRRAAPRGTCSRSASSIATSIVLSWLPSPFSCGLPSEAGPTEWRAPTIAGAPIATNSDVSPFRV

SEQ ID NO: 79447 - protein, 441 aa, Zea mays
  Coding DNA Sequence Number=SeqID_37668
  Homolog annotation: Hit_ID=Q10AZ7; Match level="QueryCoverage=7%, HitCoverage=6%, E-value=4e-08, Identity=87%"; Hit description=Kelch motif family protein, expressed
MAPIVGGRVSRGDPALPSISPLMAPIVGGRAGVPCLGRVCGTWADRARPDYVSGLTGPCRAARLGNSSLKAGARASTNLTVPPLQPPPTLSSFLQSRPRPRRLPCIPPSTAPTSFPASRGDPALPSISPLMAPIVGGRVGEVARVSPVVVVSFGPTVGRYCFHPPTLTSLLHLIPSPPPARLPAVHRSPPSAAIQPPVQGSSSRSQPCPVPSRREARRLGSWSEDKETRERMQQLQPKQMHWVRTDSSDFGGDRPAPRSGHTAVIYRHMHPPPRLLLRCLPLTPRLLHATSSMQHSSPPMWPPSHQRHDASCEEDDLYGYGGIVNEWGTIGLLLLEAAAERIVGDGALETWGVGDKATRVKLCMLGVPVGVQREGDHTRRAAPRGTCSRSASSIATSIVLSWLPSPFSCGLPSEAGPTEWRAPTIAGAPIATNSDVSPFRV

SEQ ID NO: 79448 - protein, 72 aa, Zea mays
  Coding DNA Sequence Number=SeqID_37669
MGAISGEMDGSAGSPRDAGKEVGAVEGGMQGRRRGRGRDCRKEDSVGGGRSGGTVRYLTSHATMKGLPGAQG

SEQ ID NO: 79449 - protein, 282 aa, Zea mays
  Coding DNA Sequence Number=SeqID_37670
  Homolog annotation: Hit_ID=Q9FWM6; Match level="QueryCoverage=39%, HitCoverage=29%, E-value=1e-32, Identity=56%"; Hit description =Putative pectin acetylesterase
  Pfam annotation: Domain name=PAE; Domain location=1-226; Score= -131.5; E_value=1.1e-07; Accession=PF03283.4; Description =Pectinacetylesterase
MNSNPVLFTLTCIRLCVTLVLLPSIKPKDNMMGMNYLLSSRRYIVVYPRVARCLHAIRDTGHLRAIWDLGWRRWQLQPEEILHWMAPGTPQMVDEFIKVDISGVNKRVIRLSNTYDPETYNDKVIGALCVFHHILASPSSDPGGYWSRCKSDPGGCSATQIATLQGLRSGMFTSLRQSESKPKAGVFINSCFAHCQSGALANIVEFQKIAEVVGDWYFERGAAVEIDCAYPCDSQSCRNLIPIDKADHPRLNFKDRYPKPYRDSHPTAPVVVPWMSGVITAM

SEQ ID NO: 79450 - protein, 112 aa, Zea mays
  Coding DNA Sequence Number=SeqID_37671
MSSATFWHRLRLILEAIGAAASQILVDAAQHRSQPSKVNSLHTSCILALGGALANIVEFQKIAEVSCRNLIPIDKADHPRLNFKDRYPELYRDSHPTAPVVVPWMSGVITAM

SEQ ID NO: 79451 - protein, 194 aa, Zea mays
  Coding DNA Sequence Number=SeqID_37672
  Homolog annotation: Hit_ID=Q1T0D3; Match level="QueryCoverage=17%, HitCoverage=55%, E-value=2e-07, Identity=79%"; Hit description =Ribosomal L29e protein
  Pfam annotation: Domain name=Ribosomal_L29e; Domain location=27-65; Score=34.0; E_value=5.4e-07; Accession=PF01779.7; Description =Ribosomal L29e protein family
MAAKAGIHLLGISSTCDSNEGFTMAKSKDHMAHNQSYKAHKNNIKKPTRGCQTSTKGFCSPIRRSSTHLINKADHPRLNFKDRYPEPYRDSHPQLKMGFVTKPETLTDGIVKLMIWHRTIPSMQGLMPLNFEGSDIVFTLLNRVYDDIGKRWSSLSDHKWDDANYLEPKQINRRLVFSMPNQGVSLILVISSEM

SEQ ID NO: 79452 - protein, 181 aa, Zea mays
  Coding DNA Sequence Number=SeqID_37673
MEVTSRHDVKHSVRGESRMAARLASQQAIPPIAAGAPPIGSSPSCRESRTTPECLRWRLNLAGGEFLRQRSYCHLPSLGVTRFSLCYGGGCEGRERRMARRTRGFTRSTEKWRGAQGAPIYPPANPGTDWRKAAHAREDHGGVLLRPHASPTEKKTRQRGGPTRQRTTAMTKRGRNVAGGG

SEQ ID NO: 79453 - protein, 169 aa, Zea mays
  Coding DNA Sequence Number=SeqID_37674
MEVTSRHDVKHSVRGESRMAARLASQQAIPPIAAGAPPIGSSPSCRESRTTPECLRWRLNLAGGEFLRQRSYCHLPSLGGTRFSLCYGGGCEGRERRMARRTRGFTRSTEKWRGAQGAPIYPPANPGTDWRKAAHAREDHGGVLLRPHASPTEKKTRQRGGPHGSVPRR

SEQ ID NO: 79454 - protein, 516 aa, Zea mays
  Coding DNA Sequence Number=SeqID_37675
  Homolog annotation: Hit_ID=Q10E61; Match level="QueryCoverage=69%, HitCoverage=90%, E-value=1e-120, Identity=53%"; Hit description =Expressed protein
MEVTSRHDVKHSVRGESRMAARLASQQAIPPIAAGAPPIGSSPSCRESRTTPECLRWRLNLAGGEFLRQRSYGHLPSLGGTRFSLCYGGGCEGRERRMARRTRGFTRSTEKWRGAQGAPIYPPANPGTDWRKAAHAREDHGGVLLRPHASPTEKKTLSAGDYGLQNGPKSFAPNSDTLVRHQVQVASLHKDLVLEDPNTRIMDPETKELYFRSQSQGDEILLLRKKIAEASLKELRLLGEKHILERRLTDLRMAVDEKQEEAISGALQQLNQKKTHLEDNMRLANELKRLYQQMHLKLRSLNDSNRNTLQQYAQGPSDRHMDQMDTGGTTPSNYFEGDRRVDGDSQLYQPDGDALPGIEGFQIAGEPRPGFQLTACGFPTNGTTLCNFQWVRHLENGTRQSIEGATMYDYVVTADDVGTFLAVDCTPMDDNGRQQAYSPEEWELATLVLTRPNYQIKFKKTGEAIIDEKYSQSLQMKIPNGRTTQFVLVTAGATLPFNTQGISEPNNEDYDVRYQL

SEQ ID NO: 79455 - protein, 92 aa, Zea mays
  Coding DNA Sequence Number=SeqID_37676
  Gene Ontology: Mol. function=enzyme activator activity; Cellular component=centrosome; Biological process=cell division
  Homolog annotation: Hit_ID=Q8L3Z8; Match level="QueryCoverage=58%, HitCoverage=10%, E-value=3e-17, Identity=75%"; Hit description =Putative fizzy-related protein
MGLLRICGLKWSYDNRQLASGGNDNGVFVQLFVWNPHSVQPVLKYTEHTAAIKAIACLPCHEFDRSWVMAPGYLVQIIVQPEHNAYEPTAHI

SEQ ID NO: 79456 - protein, 563 aa, Zea mays
  Coding DNA Sequence Number=SeqID_37677
  Gene Ontology: Mol. function=enzyme activator activity; Cellular component=anaphase-promoting complex; Biological process=cell division
  Homolog annotation: Hit_ID=Q10SH0; Match level="QueryCoverage=81%, HitCoverage=86%, E-value=0.0, Identity=78%"; Hit description=Fizzy -related protein, putative, expressed
  Pfam annotation: Domain name=WD40; Domain location=235-273; Score =16.3; E_value=0.11; Accession=PF00400.22; Description=WD domain, G -beta repeat
  Pfam annotation: Domain name=WD40; Domain location=277-313; Score =22.8; E_value=0.0013; Accession=PF00400.22; Description=WD domain, G- beta repeat
  Pfam annotation: Domain name=WD40; Domain location=318-356; Score =38.2; E_value=2.8e-08; Accession=PF00400.22; Description=WD domain, G-beta repeat
  Pfam annotation: Domain name=WD40; Domain location=360-401; Score =19.5; E_value=0.012; Accession=PF00400.22; Description=WD domain, G -beta repeat
  Pfam annotation: Domain name=WD40; Domain location=448-486; Score =38.1; E_value=3.1e-08; Accession=PF00400.22; Description=WD domain, G-beta repeat
  Pfam module annotation: Pfam domain module=WD40::WD40::WD40::WD40::WD4 0; Domain location=235-273::277-313::318-356::360-401::448-486
  Subcellular localization annotation: CTP_CleavageSite=75; ConfidenceScore=5.75e-01
MENSASSKPPTPASTPNSRLASAPSPRHSATPPHASAPASAPAPASRTVYSDRFIPSRAGSNLALFDLGPSPSPAAAAASSSSSHEAGPAASSGSAPAAASPYCALLRAALFGPDTPDRVASSAAACSSSSSSPGLSPVGTPATGNIFRFKTEVRRNAKRALFSGGEEEEDALFPGIFTTRGAGPRKVPRSPYKVLDAPALQDDFYLNLVDWSSHNVLAVGLGNCVYLWNACSSKVTKLCDLGVDDNVCSVGWAQRGTHLAVGTNQGKVQIWDATRCKRIRTMESHRMRVGALAWSSSLLSSGSRDKSILHHDIRAQEDHVSKLTGHKSEVCGLKWSYDNRQLASGGNDNRLFVWNPHSVQPVLKYTEHTAAVKAIAWSPHLHGLLASGGGTADRCIRFWNTTTNAHLSCVDTGSQVCNLAWSKNVNELVSTHGYSQNQIIVWRYPTMSKLATLTGHTYRVLYLAISPDGQTIVTGAGDETLRFWNVFPSPKSQHMLMTINITPFASTIKGSPLFEMARYSLVNRLANPGMALFARSVHIYQSNGFIGVDIEEGGFKHQHCPN

SEQ ID NO: 79457 - protein, 369 aa, Zea mays
  Coding DNA Sequence Number=SeqID_37678
  Gene Ontology: Mol. function=enzyme activator activity; Cellular component=anaphase-promoting complex; Biological process=cell division
  Homolog annotation: Hit_ID=Q10SH0; Match level="QueryCoverage=84%, HitCoverage=59%, E-value=1e-164, Identity=88%"; Hit description =Fizzy-related protein, putative, expressed
  Pfam annotation: Domain name=WD40; Domain location=124-162; Score =38.2; E_value=2.8e-08; Accession=PF00400.22; Description=WD domain, G-beta repeat
  Pfam annotation: Domain name=WD40; Domain location=166-207; Score =19.5; E_value=0.012; Accession=PF00400.22; Description=WD domain, G -beta repeat
  Pfam annotation: Domain name=WD40; Domain location=254-292; Score =38.1; E_value=3.1e-08; Accession=PF00400.22; Description=WD domain, G-beta repeat
  Pfam annotation: Domain name=WD40; Domain location=41-79; Score=16.3; E_value=0.11; Accession=PF00400.22; Description=WD domain, G-beta repeat
  Pfam annotation: Domain name=WD40; Domain location=83-119; Score =22.8; E_value=0.0013; Accession=PF00400.22; Description=WD domain, G- beta repeat
  Pfam module annotation: Pfam domain module=WD40::WD40::WD40::WD40::WD4 0; Domain location=124-162::166-207::254-292::41-79::83-119
VLDAPALQDDFYLNLVDWSSHNVLAVGLGNCVYLWNACSSKVTKLCDLGVDDNVCSVGWAQRGTHLAVGTNQGKVQIWDATRCKRIRTMESHRMRVGALAWSSSLLSSGSRDKSILHHDIRAQEDHVSKLTGHKSEVCGLKWSYDNRQLASGGNDNRLFVWNPHSVQPVLKYTEHTAAVKAIAWSPHLHGLLASGGGTADRCIRFWNTTTNAHLSCVDTGSQVCNLAWSKNVNELVSTHGYSQNQIIVWRYPTMSKLATLTGHTYRVLYLAISPDGQTIVTGAGDETLRFWNVFPSPKSQHMLMTINITPFASTIKGSPLFEMARYSLVNRLANPGMALFARSVHIYQSNGFIGVDIEEGGFKHQHCPN

SEQ ID NO: 79458 - protein, 55 aa, Zea mays
  Coding DNA Sequence Number=SeqID_37679
MANGPKTDFWPRPRKRARGRAQDPPVVTPRETWKFGSTREGKRNSPKSWEGVCPS

SEQ ID NO: 79459 - protein, 81 aa, Zea mays
  Coding DNA Sequence Number=SeqID_37680
  Subcellular localization annotation: CTP_CleavageSite=45; ConfidenceScore=5.26e-01
MANGPKTDFWPRPRKRARGRAQDPPVVTPRETWKFGSTREGKRVSSAEPRTPSRPSRGRSAPYRTQLRLALLAAWPAVVRP

SEQ ID NO: 79460 - protein, 86 aa, Zea mays
  Coding DNA Sequence Number=SeqID_37681
  Subcellular localization annotation: CTP_CleavageSite=16; ConfidenceScore=5.11e-01
MANGPKTDFWPRPRKRARGRAQDPPVVTPRETWKFGSTREGKRNSPKSWEGVSSAEPRTPSRPSRGRSAPYRAQLRLALLAAWPAV

SEQ ID NO: 79461 - protein, 159 aa, Zea mays
  Coding DNA Sequence Number=SeqID_37682
  Gene Ontology: Mol. function=protein domain specific binding; Cellular component=intracellular; Biological process=regulation of progression through cell cycle
  Homolog annotation: Hit_ID=Q2R2W2; Match level="QueryCoverage=46%, HitCoverage=27%, E-value=2e-32, Identity=94%"; Hit description=14-3 -3-like protein GF14-D
  Pfam annotation: Domain name=14-3-3; Domain location=1-154; Score =22.5; E_value=2.8e-05; Accession=PF00244.10; Description=14-3-3 protein
MAENPVEHSRTKHIDIRHHFLRDHQQKGDIEVFHVSTENQLADIFTKPLDEKTFCRYLAEFKSGAERKDAAESTMNAYKAAQDIALADLAPTHPIRLGLALNFSVFYYEILNSPDRACNLAKQAFEEDIPPSQYYYPGVKRKLTMTQAAISREAGPPRL

SEQ ID NO: 79462 - protein, 348 aa, Zea mays
  Coding DNA Sequence Number=SeqID_37683
  Gene Ontology: Mol. function=sequence-specific DNA binding; Cellular component=nucleus; Biological process=regulation of transcription, DNA-dependent
  Homolog annotation: Hit_ID=Q41813; Match level="QueryCoverage=58%, HitCoverage=25%, E-value=1e-114, Identity=63%"; Hit description =Hox2b protein
  Pfam annotation: Domain name=14-3-3; Domain location=1-148; Score= -16.8; E_value=0.02; Accession=PF00244.10; Description=14-3-3 protein
MGLFLCRGYGYGVVIPGGYLPIAISMRSTQKVFYKRSLYLAEFKSGAERKDAAESTMNAYKAAQDIALADLAPTHPIRLGLALNFSVFYYKILNSPDRACNLAKQALYKPDADTNDMISEKLMVQINLNEGIEEDIPPSQYTTRCEEKLTMTQAAISREAGPPGYDPGENFLQVSSMITSCEQSVIMAPSAIARGVGPPGYTPGEHQGNGAPWNTSYERRAFTSPATSSREVRPPGYGPEENQGSGISCNTSREQILFMSPTTISRELGPPGYLPRENQRSDTSWNTSCESGLFMSPATTSIEHGPPGYGPEVLMLALLCILFSINSCIYYFCPEIFRMTICTSYNYD

SEQ ID NO: 79463 - protein, 577 aa, Zea mays
  Coding DNA Sequence Number=SeqID_37684
  Homolog annotation: Hit_ID=Q41813; Match level="QueryCoverage=36%, HitCoverage=25%, E-value=1e-109, Identity=57%"; Hit description =Hox2b protein
  Pfam annotation: Domain name=14-3-3; Domain location=1-217; Score =290.1; E_value=4.2e-84; Accession=PF00244.10; Description=14-3-3 protein
  Pfam annotation: Domain name=WCOR413; Domain location=437-568; Score =125.4; E_value=1.6e-34; Accession=PF05562.2; Description=Cold acclimation protein WCOR413
  Pfam module annotation: Pfam domain module=14-3-3::WCOR413; Domain location=1-217::437-568
MAESPHASKPRGELFVEERNLLSVAYKNVIGARRASWRIISSIEQKEEGRGNEAHAATIRAYRSKIETELARICDGILALLDSHLVPSAGGAESKVFYLKMKGDYHRYLAEFKSGAERKDAAESTMNAYKAAQDIALADLAPTHPIRLGIALNFSVFYYKILNSPDRACNLAKQALYKPDADTNDMISEKLMVQINLNEGIEEDIPPSQYTTRCEEKLTMTQAAISREAGPPGYDPGENFLQVSSMITSCEQSVIMAPSAIARGVGPPGYTPGEHQGNGAPWNTSYERRPFTSPATSSREVRPPGYGPEENQGSGISCNTSREQILFMSPTTISRELGPPGYFPRENQRSDTSWNTSCESGLFMSPATTSIEHEIAQSFSQQRKKREGGGPTYHETFAYAQGPFACVPEAYVLSLGIYLLPNRECTRTLFTCGIPTIKMWEQQVLEISAMVPPPSTSADRLGPVLLGCIRDVLWHGHFLRYLLILDRTNWKTNMLTTLLVPYIFFTLPNVLFSLIRGEVGKWIAIIAVILRLFFPRHFPEHIRASDGLRNAFRKGNGVSNSIGILLLFIYPVWTGVL

SEQ ID NO: 79464 - protein, 121 aa, Zea mays
  Coding DNA Sequence Number=SeqID_37685
MAPASSARGVACPARELMRQYRRFTGHLLRVRESFEERNTGASSLCCGRGLSCRFKGGCEPGGGTRERDLVGVGALQSSLGFKDFHHAARLQSPAGGHPGVSLVVGKSEPGRGLSLALSFK

SEQ ID NO: 79465 - protein, 309 aa, Zea mays
  Coding DNA Sequence Number=SeqID_37686
MAIPSGGQLQHLPVFPQPHHFPLPGANARGGQGGPWPHLNFFNPLYLGLAAAVGSPPTHSRHPALDQPPPPGRLILPSRGRPPSSQPLQQSPSRRRASAKSSSTSNLQAAAARRSLSAAAEPPAPPRPQAGSGAAPLVGGGPGAGRVQAAVLGQHRRGGTGAGSPDAGALCRLGAAAATARRRAPAPMDAGHLSYATAAAAPRGSGAAAAGERSFFHRRSPEPPTPSLARRPLLRGPCRDPPWRGAPKPPPLVCCPLLSLMPARPSPFGQPLPFPGCTHAASLAVGAALPFPGLPSRRHRLRAPLCLRR

SEQ ID NO: 79466 - protein, 231 aa, Zea mays
  Coding DNA Sequence Number=SeqID_37687
MVSVPAAEKKGNVGSGREGHGSDGSEREDAIQPKGRRIEPERSQQRGSGREGRGSDGSNEGDEGVGGGAGPAGQGPAPDLARGVGSTGDGRSSKGGATWCCWSRHRGARSRWRRLGRPGKGRAAPTASEAACVQPGKGRGWPKGEGLAGMRERRGQQTNGGGLGAPRQGGSRQGPRSMGRRAKEGVGGSGDRRWKKERSPAAAAPDPLGAAAAVAYERWPASMVGRSSPAG

SEQ ID NO: 79467 - protein, 104 aa, Zea mays
  Coding DNA Sequence Number=SeqID_37688
MVSVPAAEKKGNVGSGREGHGSDGSEREDAIQPKGRRIEPERSQQRGSGREGRGSDGSNEGDEGVGGGAGPAGQGPAPDLARGVGSTGDGRSSKGGATWCCWSR

SEQ ID NO: 79468 - protein, 315 aa, Zea mays
  Coding DNA Sequence Number=SeqID_37689
  Homolog annotation: Hit_ID=Q71CZ3; Match level="QueryCoverage=38%, HitCoverage=8%, E-value=3e-43, Identity=75%"; Hit description =Multidrug resistance associated protein MRP2
  Pfam annotation: Domain name=ABC_tran; Domain location=1-99; Score= -13.6; E_value=2.7e-06; Accession=PF00005.17; Description=ABC transporter
MKKEHYVKRLPLAFEAVQLVENGENWSVGQRQLVCLGRVILKRSKVLVLDEATASVDTATDGLIQRTLRRQFKETTVITIAHRITSVLDSHMVLLLDNGVAVEHDRPDKLLEDKSSLFSKLVAEYTMRTNHRATIGNTVLLQKAPRALVGQPQTLTCPQLKGKCAIGTFPSILVIECQHKCLSANLCQLMDKVQIKRKVLETGKDQFGKDLAKQPRLCAVWVHRTVSGQCPVRQWLWIFNGRLRHRRKEICTGQCPVRQATEGKNCLPGMLSTAPSCLGAIKGTPRRMEEYIKHSLSIPKHQDSNSAHSILCDSN

SEQ ID NO: 79469 - protein, 1905 aa, Zea mays
  Coding DNA Sequence Number=SeqID_37690
  Gene Ontology: Mol. function=ATPase activity, coupled to transmembrane movement of substances; Cellular component=integral to membrane; Biological process=transport
  Homolog annotation: Hit_ID=Q71CZ3; Match level="QueryCoverage=76%, HitCoverage=99%, E-value=0.0, Identity=61%"; Hit description =Multidrug resistance associated protein MRP2
  Pfam annotation: Domain name=ABC_membrane; Domain location=752-1023; Score=54.6; E_value=3.4e-13; Accession=PF00664.13; Description=ABC transporter transmembrane region
  Pfam annotation: Domain name=ABC_tran; Domain location=1098-1253; Score=105.1; E_value=2e-28; Accession=PF00005.17; Description=ABC transporter
  Pfam annotation: Domain name=ABC_tran; Domain location=1658-1872; Score=127.0; E_value=5.2e-35; Accession=PF00005.17; Description=ABC transporter
  Pfam annotation: Domain name=MMR_HSR1; Domain location=1659-1787; Score=-13.2; E_value=0.016; Accession=PF01926.13; Description=GTPase of unknown function
  Pfam module annotation: Pfam domain module=ABC_membrane::ABC _tran::ABC_tran::MMR_HSR1; Domain location=752-1023::1098-1253::1658 -1872::1659-1787
  Subcellular localization annotation: CTP_CleavageSite=49; ConfidenceScore=5.49e-01
MAAQGAGRAVSSSLAKSLGLRKPKREAGSGAKNRHQTLSREKRATLRLRHNNRVSKGRNQAPSLPTDQRFEGWPPEGFDSRLRSRGPYTHYWLSPEGVHSRLRRRARDDHGYVRYITKARAALPSSPETPCSAPIEGNMALSPSSLRKGDAGAARTRAQPQKTTNSAPPDPGLGLGLSPRRRRTPLRPTQGSDSGSAPEDDELRFARPQGSDSAPASADDLRLARPRGSDSASAMEDRLDLGFGGASTSPNLGCRPATSTGGAIITLPRADSGRREQDPGPLREGWPRGDEDETGARLEAARSLIRVDACNRLLQAHPTWARDEHEGRGIPTSLTPVSDRLALPPSRSPSRSTHLGWGTRRHSLVGLRDPRSRNADSRPGPRKEPGTRHSFDRHGRVAVTTTDAMCHRLCRPCIKVRTCQSRASAAAAMAATPAWDWEESLVFFLQPFFLHGVSAAAHLILALAVAGRLLFRRLSASRTKDGEVGGGDASRGVGRFRYWYGVSVCTTWAMGAFEVLLAVYSWYANGGAGWSRDAVVEQVDAAARAVSWLLLAAYLQFDFWWRRQRQERFPVALRLWLALFMLLSVVTVGVHAAMILDGSLVPGRSWALDAVSVTAAAVLLSVSAGFFGRKEGEGGGHASEAHEPLLNGAHEGSGDDDENSSSAADASLFTGAGFLSVLTFSWMTPLLGVGHRKTLVPEDVPGLEPGDSVAGVLPPFKANLEALTGDGGRSSRKAVTAFKLTKALLRTLRWHVAVTAFYTLVYCVAVYVGPYLIDSLVQYLYLNGDERYASKGQLLVLAFVVAKVLECLSQRHLFFRLQQAGIRARSALVAVLYQKSLALSSQSRRSHTSGEMINIVSVDADRVGIFSWYLHEVWQVPLQVVMAMFILYSTLGVASLAALGATVATGLATVPLGRMQERFQEKLMDSKDGRMKATSEILHSMRILKLQGWEMRFLSKIIELRKTEANWLKRYLYTSATMTFIFWGTPTFVAVVTFGACMLMGIPLETGKMLSALATFRVLEEPIYELPGTIAMVIKTKVSLDRIASFLCLDELPSDAVQRLPRGSSADFAVSVGNGCFSWEASPDAPTLKDLNFQARPGMRVAVCGTVGSGKSSLLSCILGEIPKLSGEVRTCGTTAYVSQSAWIQSGKIQENILFGMEMDRDKYDRVLESCALKKDLENLPFGDQTVIGERGINLSGGQKQRIQIARALYQDADVYLFDDPFSAVDAHTGSHIFKVMKDGRIAQAGRYDEILGSGEEFMELVGAHEESLTALDVVDAMNENEANVSSSPSSRIETPNLSRSLSLAEKKHGATNEAEGDDDDARSGQLVQEEEREKGRVGFWVYWEYLTQAYKGALVPLVLLAQTLFQIMQIASNYWMAWATPASKDAEPPVSAPTLLFVYVVLALGSSLCILASTDQSEVDTNIADQMGTVAFSIIQLVGITAVMSQVAWQVFVVFVPVFAACVWYQRYYIDTARELQRLVGVCRAPIIQHFAESIAGSSTIRSFGKEDQFVSTNSRLTDAYSRPKFYNAGAREWLCFRLDVLSSLAFAFSLIFLINLPAGLIDPGIAGLAITYGLTLNTLQAQVVWSMCTLENKIISVERILQYMGVPAEPPLVMPENKLAQSWPSNGEIQLQNLHVKYAPQLPFVLKGLTVAFPGGVKTGIVGRTGSGKSTLIQSLFRIVDPAVGQIVIDGIDIRTVGLHDLRSRLSIIPQEPTMFEGTVRSNLDPLGEYSDDQIWEAFGLLSARGRSQEAGAEARLTRSESDTLGAIDLGAELGATSTPRQLVDDSAAVVENGENWSVGQRQLVCLGRVILKRSKVLVLDEATASVDTATDGLIQRTLRRQFKETTVITIAHRITSVLDSHMVLLLDNGVAVEHDRPDKLLEDKSSLFSKLVAEYTMRSVLT

SEQ ID NO: 79470 - protein, 190 aa, Zea mays
  Coding DNA Sequence Number=SeqID_37691
  Subcellular localization annotation: CTP_CleavageSite=49; ConfidenceScore=5.48e-01
MAAQGAGRAVSSSLAKSLGLRKPKREAGSGAKNRHQTLSREKRATLRLRHNNRVSKGRNQAPSLPTDQRFEGWPPEGFDSRLRSRGPYTHYWSELTGDTMFGAHRGQHGAFPLLLAERRRRGVCKKAESVPDRPLALCRGSGAALANPAPAEPLTASTYQPENLGPDRTPELRPARMREQPDQPKHYTRH

SEQ ID NO: 79471 - protein, 192 aa, Zea mays
  Coding DNA Sequence Number=SeqID_37692
MRRKDGGYPPSGGLEGGKTRCMREREDMVYFQGGHPPFKGDYPYLRPQPSRAKSSPTRSKALPCGAGAGSHTSCKPAQSRRSQTAARGTGKGGYPEKDPSPGRNQAPSLPTDQRFEGWPPEWFDNRLRSRGPYTHYCQGSVHSSDSITPRPSLASDKGSRPRRIFVSPEAPPNGEHISGSPEALPSLRSNPD

SEQ ID NO: 79472 - protein, 319 aa, Zea mays
  Coding DNA Sequence Number=SeqID_37693
MQPRKAGPLAKKCDESLQASANTPFEARGLLSGTIIRGISPFERLDHASPEPSLGQGQPTPGGFPSRPRPPSDGEHISGSPEALPSLSGALREGWPRGDEDETGALLGPLASLSRVDACNPLLQAHPTWARDEHEGRGIPTSLTPVSGRLASPPSRSPSRSTHLGWGTRRHSLVGPRDPLSRNADTDCIDTFRKKENIPVIDGAQNARGGAAKTWHNQSMMTHVGCFKNSKVLDTAAAGSSAPVHGVAALFRAAHNSRARTVNSVSFTDLWRTWNKDYTGNRACDSLEISGHSEVGESAAWSPDKGKTPQDTGADQLSG

SEQ ID NO: 79473 - protein, 142 aa, Zea mays
  Coding DNA Sequence Number=SeqID_37694
MKLDWTTISLFLFTYNLAWGSDEAETVVMGRWDLGRDNDSPENTPCPTPMGIVPKWKSNGWRVSLIRGKGRFTHLAVARDFQGVACPIARVILVPSSPKCGDAVNWRCRPPLRRPVHPCRPRSVSRAHRSLVRSLKLSAPLV

SEQ ID NO: 79474 - protein, 59 aa, Zea mays
  Coding DNA Sequence Number=SeqID_37695
MYSSKDPQKYRILPRMITQGYLNVYYVLGIPKSLMSEVGCEPMNLDVGRADQCAGAYVV

SEQ ID NO: 79475 - protein, 427 aa, Zea mays
  Coding DNA Sequence Number=SeqID_37696
  Homolog annotation: Hit_ID=Q8W5J2; Match level="QueryCoverage=40%, HitCoverage=94%, E-value=6e-74, Identity=70%"; Hit description =Putative ABA-responsive protein
  Pfam annotation: Domain name=GRAM; Domain location=159-237; Score =40.6; E_value=5.2e-09; Accession=PF02893.10; Description=GRAM domain
MEAAPPCPSHHNHAAPSPAEPETSELAVEAMPLGDGAEAVDFVLPDKLLAALPRDTYEQLDLARCITALAVSGWETNARLRSPMLTMADLLQAMETFTQEHVIGIPLTSFAYADEERQGKSSCSTMVHKKITMGPKISETIKGKLSFGAKVLQAGGIDKVFREYFAVEKDEKLRKAFQCYLSTTAGPIAGMLFISTKKIAFHSDRPLSFTSPKGGSTRVPYKVLIPTERMKSASVRENLYNPDEKYIDVVTVDGFDFWFMGFVSYEKSQWWPKALKSFASRIQHFLKILGTREENWKKPFDMRAREKISGRGRSYDGRLHSRSPGLNDSPRGRSRSQSRSYSPTLKQKHYSRSPAPRPRERSLSRSPAVNRSRSASPIVSSTLVCTLGYLNVYYVLGIPKSLMSEVGCEPMNLDVGRADQCAGAYVV

SEQ ID NO: 79476 - protein, 620 aa, Zea mays
  Coding DNA Sequence Number=SeqID_37697
  Gene Ontology: Mol. function=helicase activity; Biological process =proteolysis
  Homolog annotation: Hit_ID=Q1EPC6; Match level="QueryCoverage=90%, HitCoverage=34%, E-value=0.0, Identity=68%"; Hit description=DNA helicase homolog, putative
MTEGVDGGKQHLTSSTITSNEDADETVLFKEDDDDEEGYLFAGQDGESGEDIEIDETQDAFTVNPDVPDLYDKVYSNIPEETHLLSTVADCDYCKAKKFQYEPPGFCCRNGQINLAAFETPLQLRRLWESADADARHFRDNIRFFNGHFSFTSLYCCLDSMTTNMDCGIYTFRAHGMMYHNVRSFGREVGAEHKHLELYFYDDDPSLEHRYRKCRQQQFEKDKAVIKQLVEILKGNPYSEHLRSMGHVDNIEDYHIALNLDQTLNQKLYNSPITSEVAAIWIEGSERRGQFSNSVMLHGKDRSSHGIRSYHGCYDALSYPLFFPKGELGWHANIPKSNVSMDEVDAYRDQHRRSDANNDDTERPSHLCVSVRDYYCYRFQIRPSIFNPILHGKRLFQQFAVDTYIKIMSSRLDFIRKNQDRLRADLYKGLVDSLHEGENRADKIGKRTVLSTSFIGGPRDMRRRYMDAMALVRKFGKPDIFLTMTCNPNWDEITRELLPMQSPQDRPDLVVRIFRAKLEELKKRLTKHHILGKIRAYVYVVEFQKRGLPHVHFLLIMQRKYKLTCPDQYDHLISAEIPDKKKYPELYKMVIKHMMHGPCGLLKPKCPCTKGRASCLFPLS

SEQ ID NO: 79477 - protein, 1575 aa, Zea mays
  Coding DNA Sequence Number=SeqID_37698
  Gene Ontology: Mol. function=helicase activity; Biological process =viral genome replication
  Homolog annotation: Hit_ID=Q8LML8; Match level="QueryCoverage=88%, HitCoverage=99%, E-value=0.0, Identity=62%"; Hit description =Putative DNA helicase homolog
  Pfam annotation: Domain name=DUF889; Domain location=1241-1477; Score= 455.0; E_value=9.6e-134; Accession=PF05970.5; Description=Eukaryotic protein of unknown function (DUF889)
MSDETKNELKKRRASRNKENVVHHEYSKVLDPKERKRIRERARCATQTKEQRTLRNMKPCQKRARGNYRIRQQVMLSQDSIAIENPTFTPELVWSSTDAQAPTGSLFSSELMAIPELIPTPFVPTPSVTEDVETKILTKSPRRQRHPCTVPATNSDKMTEGVDVGKQHLTSSTITTNEDADETVLFKEDDDDEEGYLFAGQDGESGEDIEIDETQDAFTVNPDVPDLYDKVYSNIPEETHLLSTVADCDYCKAKKFQYEPPGFCCRNGQINLAAFETPLQLRRLWESADADARHFRDNIRFFNGHFSFTSLYCCLDSMTTNMDCGIYTFRAHGMMYHNVRSFGREVGAEHKHLELYFYDDDPSLEHRYRKCRQQQFEKDKAVIKQLVEILKGNPYSEHLRSMGHVDNIEDYHIALNLDQTLNQKLYNSPITSEVAAIWIEGSERRGQFSNSVMLHGKDRSSHGIRSYHGCYDALSYPLFFPKGELGWHANIPKSNVSMDEVDAYRDQHRRSDANNDDTERPSHLCVSVRDYYCYRFQIRPSIFNPILHGKRLFQQFAVDTYIKIMSSRLDFIRKNQDRLRADLYKGLVDSLHEGENRADKIGKRTVLSTSFIGGPRDMRRRYMDAMALVRKFGKPDIFLTMTCNPNWDEITRELLPMQSPQDRPDLVVRIFRAKLEELKKRLTKHHILGKIRAYVYVVEFQKRGLPHVHFLLIMQRKYKLTCPDQYDHLISAEIPDKKKYPELYKMVIKHMMHGPCGLLNPKCPCTKGRASCKNHYPRAFSNATSQGKDSYPIYRRRDDGRKETVRGCELDNRWVVPYNPYLLQLFNCHINVEACGSIKAVKYLFKYIYKGHDRASVAVTDANKADGDVDEIKQYRDARWVTPPEALWRIFSFDLSQNSPPVMQLQLHLENMHMVSFHERAKVNHVVQRPGADRSMLTAYFEANRLHEEARGILYRDFPEWYTLQQGKVWQRRKRNTGGQVGRIVSAHPAERERFYLRLLLNHVTGATSYADLRTVDGDTLPTFREAAQRRGLFEADDTIDECLNEAAIYQMPSALRRLFATILVYCEPNDVAELWQRHLDSMSEDYHRSTQSKIHVQQMVLIDIRNILQSMGKDIKTFPLPAIIDRYDDLHGTDREIYEEETLRSQDKIAVATATSGVAASILPGGRTAHSRFKIPLTIDDGAVCSFTKQSGTSKLLQKASLIIWDEASMTKRQAIEALDNSMRDIMGQSRLPFGGKTVVFGGDFRQVLPVVRKGSRAQIVAASLRSSYLWESMCHLKLFQNMRAQSDPWFAEYLLRVGGGTEEANNDGDVRLPDEVCVPYTGNDRDLDRLIDDIYPNLNENMSNTSYITSRAILSTRNDWVDMINMRMIDRFQGEQMMYHSFDTAVDDPNNYYPSEFLNTLTPNGLPPHVLKLKVGCPIMLLRNIDPANGLCNGTRLVVRGFQKNSIDAEIVLGQHAGMRIFLPRIPLCPSDDEMFPFQFKRKQFPIRLSFAMTVNKAQGQTIPNVGVYLPEPVFSHGQLYVALSRATARSKVKILAIPVHDEKKKKKGVERNSAINGATYTKNIVYKEVLTP

SEQ ID NO: 79478 - protein, 78 aa, Zea mays
  Coding DNA Sequence Number=SeqID_37699
MSALSALPSGLPRETLIWAAINGDRDLPFYFTFTAHGTHPNPPRGSRGIKLGQWLDGAIGTAVESLRAVAEGHPNFNH

SEQ ID NO: 79479 - protein, 90 aa, Zea mays
  Coding DNA Sequence Number=SeqID_37700
MARRSNWRRCGSLRAGAEGHPNFNHCLWRLIEWMGFEIVWNRGCRIQGLWVIPVHFRGDLIPSIDGRSDGSGSPVPLRRCRVAKEPLEPL

SEQ ID NO: 79480 - protein, 147 aa, Zea mays
  Coding DNA Sequence Number=SeqID_37701
MGRHGPPWTDFRPRPCQGFDCDQVASQCRGEAIPTTESSCGWPELGQWLDGAIGAAVDRSAPWPRANPTSTTGKPPRFRSLGFPPCVAPTSRANRVVDSGGTAAVNLSAAAVGQGTAQLGLRKKISALPLDRSPAARIRTPNPLSRE

SEQ ID NO: 79481 - protein, 407 aa, Zea mays
  Coding DNA Sequence Number=SeqID_37702
  Subcellular localization annotation: CTP_CleavageSite=37; ConfidenceScore=5.33e-01
MTAIAAKSSQGPPYTDHSPTALAPFRCQLGLWMTRVLTAKRSNTDKHGAKGLDSMREGVNATFNPSRPFAESTPQGASSTSKDAVGWYPQLRRGRPDDQLSPPLSTTLFAPEVGATQGGNPSDLNRGGLPVVEVGVALGPGAERSTAAPIAPSSHWPSSGHPLDDSVPPKTEVVVALLVQWPPASHLEFVIPQAFWSGQPPRALPTSKSRYHCYPKIIYPSVSYLSWKVTSERRGGFLLSRPEATAWAGTLAKGLAVVVGSARSARAMASQQRDRAEGFETALDEVVKNCKALAEAAEQKEADRVAMSEAISAFCQAFGLDGVSSGSSPRVICGPWAAIGLMRLSRARVRLASSFEVEILPPVSPPRPGQILPRVEMTPSVLLLPLLMFEPARTVSKYAYVFAVAEA

SEQ ID NO: 79482 - protein, 359 aa, Zea mays
  Coding DNA Sequence Number=SeqID_37703
  Subcellular localization annotation: CTP_CleavageSite=66; ConfidenceScore=5.02e-01
AKGLDSMREGVNATFNPSRPFAESTPQGASSTSKDAVGWYPQLRRGRPDDQLSPPLSTTLFAPEVGATQGGNPSDLNRGGLPVVEVGVALGPGAERSTAAPIAPSSHWPSSGHPLDDSVPPKTEVVVALLVQWPPASHLEFVIPQAFWSGQPPRALPTSKSRYHCYPKIIYPSVSYLSWKVTSERRGGFLLSRPEATAWAGTLAKGLAVVVGSARSARAMASQQRDRAEGFETALDEVVKNCKALAEAAEQKEADRVAMSEAISAFCQAFGLDGVSSGSSPRVICGPWAAIGLMRLSRARVRLASSFEVEILPPVSPPRPGQILPRVEMTPSVLLLPLLMFEPARTVSKYAYVFAVAEA

SEQ ID NO: 79483 - protein, 303 aa, Zea mays
  Coding DNA Sequence Number=SeqID_37704
  Gene Ontology: Mol. function=protein serine/threonine kinase activity; Cellular component=nucleus; Biological process=meiotic telophase I
  Homolog annotation: Hit_ID=Q75RY2; Match level="QueryCoverage=88%, HitCoverage=53%, E-value=4e-45, Identity=39%"; Hit description =Protein PAIR1
MTVRLFEIVNLFEIMVPLCVGPTEDVERKFQHMASSVHKVGMVLDSVQTDVMQLNRAMKEATLDSGSIQQKIVLLDALLQKNLKGQDDLKALVESNTKSISDQLTVLNSYSNKLDEISSTLSILPKQIETNLKQQQSDTFRIFRKDMEEIVRAVRSLNNKIDAIQMPTDQSCTTNGRPLMNQLPVDRNERPQVNQTPEVTRVSQTPVATMANQRPVAKGRHLVSQTPAANGKPLTNQTSVANGRSLMSQVPAANGKPLTNQIAVPKGRPMMRQKTAEGGRPQMNQIPVADGWPHTNKIHAPEV

SEQ ID NO: 79484 - protein, 345 aa, Zea mays
  Coding DNA Sequence Number=SeqID_37705
  Gene Ontology: Cellular component=nucleus; Biological process=meiotic telophase I
  Homolog annotation: Hit_ID=Q75RY2; Match level="QueryCoverage=90%, HitCoverage=69%, E-value=5e-57, Identity=45%"; Hit description =Protein PAIR1
MTVRLFEIVNLFEIMVPLCVGPTEDVERKFQHMASSVHKVGMVLDSVQTDVMQLNRAMKEATLDSGSIQQKIVLLDALLQKNLKGQDDLKALVESNTKSISDQLTVLNSYSNKLDEISSTLSILPKQIETNLKQQQSDTFRIFRKDMEEIVRAVRSLNNKIDAIQMPTDQSCTTNGRPLMNQLPVDRNERPQVNQTPEAASFLITSGLPTDDRRHPVPLVCPAAGPRPKVEEGKLRAVPQKLTGCRSRVTPKQEEAATNTKVVVGRAAATEKVVIFIDDDSDDGGSEALASCVILRPAPLGSGAGECDLVKVGAEESQEILRRARKRRRREMQAIVACMPPELGY

SEQ ID NO: 79485 - protein, 215 aa, Zea mays
  Coding DNA Sequence Number=SeqID_37706
  Homolog annotation: Hit_ID=Q10T01; Match level="QueryCoverage=35%, HitCoverage=7%, E-value=7e-15, Identity=65%"; Hit description =Expressed protein
MSPKPFLQEEKMIPVPRTLNEDLPVDTPQQDNGATSTTVIGCREAATEKVVIFIDDDSDDGGNEALASCVILRPAPLGSGAGECDLVKVGAEESQEILRRARKRRRREMQAIVACMPPELGNRKKMGKRSQKRLIRRHQDGSIGCMAGLIRMFYSRHDANKLLLDRKQPGSRRHSFSAFSGRRGHSRKNSKDLDEIDEYGDYACVYFNISHRYRF

SEQ ID NO: 79486 - protein, 122 aa, Zea mays
  Coding DNA Sequence Number=SeqID_37707
MAMCGSLSGMVGVGWSTCAGGDARRRLGIRPTHDAIVQLNRSESFARGQEGQCGGQLKSGEGESASPVRQCLGSSLEKLHDFTGKWSRGWGEDGGQQKGLATMAVLMQRWRAVVLAFHGELR

SEQ ID NO: 79487 - protein, 341 aa, Zea mays
  Coding DNA Sequence Number=SeqID_37708
MPRLKLGEASRGSGPGAGARLRVNRRGWPQWPCSGRDGGRWCSLSTANSGDHWLGRGSRCSFVVYVVEVERFGAVYRELSCRYGDSVTMSSPKMACIRCTARKSVIPFLPSRLAERPLRHTVPGQSSHLERLHCRLHEEQECRRQEQEQQDSSPSPRREVESERPPSPAPQLEMPPAPPQGIPAAGGDPDGDGDNDDAGGSSSHDTELSEEPEPEGWIARPITRDAARGGVADGLDLKYYPRRLTGSAGGVIASPVGEGNPRLNNMVNLAAVLNTELDHALDELGKVRAEVVELRAECAARHYLDGGSPAPVEIQHPYHSPPRGRFDYGTPDCRTRIDLDP

SEQ ID NO: 79488 - protein, 323 aa, Zea mays
  Coding DNA Sequence Number=SeqID_37709
MPRLKLGEASRGSGPGAGARLRVNRRGWPQWPCSGRDGGRWCSLSTANSGDHWLGRGSRELSCRYGDSVTMSSPKMACIRCTARKSVIPFLPSRLAERPLRHTVPGQSSHLERLHCRLHEEQECRRQEQEQQDSSPSPRREVESERPPSPAPQLEMPPAPPQGIPAAGGDPDGDGDNDDAGGSSSHDTELSEEPEPEGWIARPITRDAARGGVADGLDLKYYPRRLTGSAGGVIASPVGEGNPRLNNMVNLAAVLNTELDHALDELGKVRAEVVELRAECAARHYLDGGSPAPVEIQHPYHSPPRGRFDYGTPDCRTRIDLDP

SEQ ID NO: 79489 - protein, 123 aa, Zea mays
  Coding DNA Sequence Number=SeqID_37710
  Gene Ontology: Mol. function=glutathione-disulfide reductase activity; Cellular component=chloroplast; Biological process =glutathione metabolic process
  Homolog annotation: Hit_ID=O64409; Match level="QueryCoverage=47%, HitCoverage=15%, E-value=2e-24, Identity=94%"; Hit description =Glutathione reductase
MAAPNTNSFCDSNFRVVAWEFIASGSVDGLYGRKEQEGLLKCLQGIEQSHPLDCAVATSGIDNTIKATEEYGDVDVFVANLRPLKATLSGLPDRVLMKILVCATSNKVVGVHMCGDDAPEIIQ

SEQ ID NO: 79490 - protein, 532 aa, Zea mays
  Coding DNA Sequence Number=SeqID_37711
  Gene Ontology: Cellular component=nucleus
  Homolog annotation: Hit_ID=Q10QQ8; Match level="QueryCoverage=91%, HitCoverage=80%, E-value=0.0, Identity=62%"; Hit description =Expressed protein
  Pfam annotation: Domain name=WD40; Domain location=391-433; Score =17.7; E_value=0.041; Accession=PF00400.22; Description=WD domain, G -beta repeat
  Pfam annotation: Domain name=WD40; Domain location=437-475; Score =30.2; E_value=7.2e-06; Accession=PF00400.22; Description=WD domain, G-beta repeat
  Pfam annotation: Domain name=WD40; Domain location=63-102; Score =10.2; E_value=2.4; Accession=PF00400.22; Description=WD domain, G -beta repeat
  Pfam module annotation: Pfam domain module=WD40::WD40::WD40; Domain location=391-433::437-475::63-102
MGAVNDGVGEGDVVIMNSGAVVDEWAYDGIGDGDGGMELRLKLAILTQCGVQVRMLDLRCGAKKSLADLPKHPLALKSCDISSVCSHQILVGGSDAFARLYDRRMLPPLSSCQTKRKPPPCVKMFCPLHLADSKKTYSHLTHVAFSPNGKEVLLSYSGEHVYLFDVDPDGMSSRYTADYVDMCKKFMQVATRSLETGIIEFDLQRKWKNDVYMAIRDCNRTWKIDVTSYQAHLHMAEALLQLGRLKEASEHAEVANGLLPPHCPLREQVDDFKQRIASAELEKNRADKNGSSKADTHGKLRSLSEILFRPDVGGSSQEGREDSDYDDDTEMDYETTVSGHESRENDQGVFRGSLSFQFHQREDQTNVHTDENGSVESPRKDDYAFQSDVAIDMKQRYVAHCNVGTDIKQASFLGEQGEFIASGSDDGRWFIWEKRTGRLIKMLAGDGAVVNCIQSHPFDCAVATSGIDNTIKLWTPDANATSMVSGPELDVLSAIENNQQKLCRNRHFVLPSEFLERFQMHEFSEGFECAQS

SEQ ID NO: 79491 - protein, 520 aa, Zea mays
  Coding DNA Sequence Number=SeqID_37712
  Gene Ontology: Mol. function=receptor activity; Cellular component =nucleus
  Homolog annotation: Hit_ID=Q10QQ8; Match level="QueryCoverage=99%, HitCoverage=80%, E-value=0.0, Identity=62%"; Hit description =Expressed protein
  Pfam annotation: Domain name=WD40; Domain location=399-441; Score =17.7; E_value=0.041; Accession=PF00400.22; Description=WD domain, G -beta repeat
  Pfam annotation: Domain name=WD40; Domain location=445-483; Score =30.2; E_value=7.2e-06; Accession=PF00400.22; Description=WD domain, G-beta repeat
  Pfam annotation: Domain name=WD40; Domain location=71-110; Score =10.2; E_value=2.4; Accession=PF00400.22; Description=WD domain, G -beta repeat
  Pfam module annotation: Pfam domain module=WD40::WD40::WD40; Domain location=399-441::445-483::71-110
MKASMVATEHVRVAKLLVMMVEVGNPNAVWSASEDGTLRQHDFRECSSCPRAGSANQECRNVLLDLRCGAKKSLADLPKHPLALKSCDISSVCSHQILVGGSDAFARLYDRRMLPPLSSCQTKRKPPPCVKMFCPLHLADSKKTYSHLTHVAFSPNGKEVLLSYSGEHVYLFDVDPDGMSSRYTADYVDMCKKFMQVATRSLETGIIEFDLQRKWKNDVYMAIRDCNRTWKIDVTSYQAHLHMAEALLQLGRLKEASEHAEVANGLLPPHCPLREQVDDFKQRIASAELEKNRADKNGSSKADTHGKLRSLSEILFRPDVGGSSQEGREDSDYDDDTEMDYETTVSGHESRENDQGVFRGSLSFQFHQREDQTNVHTDENGSVESPRKDDYAFQSDVAIDMKQRYVAHCNVGTDIKQASFLGEQGEFIASGSDDGRWFIWEKRTGRLIKMLAGDGAVVNCIQSHPFDCAVATSGIDNTIKLWTPDANATSMVSGPELDVLSAIENNQQKLCRNPSLCTAF

SEQ ID NO: 79492 - protein, 393 aa, Zea mays
  Coding DNA Sequence Number=SeqID_37713
  Subcellular localization annotation: CTP_CleavageSite=29; ConfidenceScore=5.21e-01
MSSSSLKRRVFPSSKPPDGGNATPWELVPLSHRSASRIFITQPGRTPSPAVTRDGDLQLDGGGKRAGLRPLPLPQPQGFSSPRPGRGECRVGVGPCVGGGPLLYSVMGGEAGIARGVRQLQRAWSSAASGFGVTCGVGVCHGSRKRFFRRRGGWDRPRADLQLLRPSARPCLTSFGTGGGLLAAASTLRSALPLFGPPEQKSPSSPLLDTRSRLFDYLNRFTKHELPRVKVTGEAGGSDISMNRGGVGSRMGTWGNRLSRLLGPDSRRSPWTAAPPEAGSGFAEDVVDAEGATAPFSVKTRACRIRSSCSVCFLWPPRPEENTLAALAKLRLFSSCFEHLDFVGNRDVCVSKSCFSRKGRVRYPYPRGVGIPRLGRPCRLRVLSPVHEALSPT

SEQ ID NO: 79493 - protein, 441 aa, Zea mays
  Coding DNA Sequence Number=SeqID_37714
MGGSEPGSFAEKDPFRATGVPVARRVGLGSRLACQESEKRVHLARLHAACMAARPFCLLVWAKMGGRLNATPWELVPLSHRSASRIFITQPGRTPSPAVTRDGDLQLDGGGKRAGLRPLPLPQPQGFSSPRPGRGECRVGVGPCVGGGPLLHSVMGGEAGIARGVRQLQRAWSSAASGFGATCGVGVCHGSRKRFFRRRGGRDRPRADLQLLRPSARPCLTSFGTGGGLLAAASTLRSALPLFGPPEQKSPSSPLLDTRSRLFDYLNRFTKHELPRVKVTGEAGGSDISMNRGGVGSRMGTWGNRLSRLLGPDSRRSPWTAAPPEAGSGFAEDVVDAEGATAPFGVKTRACRIRSSCSVCFLRPPRPEENTLAALAKLRLFSSCFEHLDFVGNRDVCVSKSCFSRKGRVRYPYPRGVGIPRLGRPCRLRVLSPVHEALSPT

SEQ ID NO: 79494 - protein, 455 aa, Zea mays
  Coding DNA Sequence Number=SeqID_37715
TGVPVARRVGLGSRLACRKSEKRVHLARLHAACMAARPFRPLVWAKMGGRLLHDVRDPAPESQGRALERVGEDSARGAWGRTNATPWELVPLSHRSASRIFITQPGRTPSPAVTRDGDLQLDGGGKRAGLRPLPLPQPQGFSSPRPGRGECRVGVGPCVGGGPLLYSVMGGEAGIARGVRQLQRAWSSAASGFGVTCGVGVCHGSRKRFFRRRGGWDRPRADLQLLRPSARPCLTSFGTGGGLLAAASTLRSALPLFGPPEQKSPSSPLLDTRSRLFDYLNRFTKHELPRVKVTGEAGGSDISMNRGGVGSRMGTWGNRLSRLLGPDSRRSPWTAAPPEAGSGFAEDVVDAEGATAPFSVKTRACRIRSSCSVCFLWPPRPEENTLAALAKLRLFSSCFEHLDFVGNRDVCVSKSCFSRKGRVRYPYPRGVGIPRLGRPCRLRVLSPVHEALSPT

SEQ ID NO: 79495 - protein, 166 aa, Zea mays
  Coding DNA Sequence Number=SeqID_37716
  Homolog annotation: Hit_ID=Q1T0S0; Match level="QueryCoverage=40%, HitCoverage=13%, E-value=1e-07, Identity=33%"; Hit description =Pentatricopeptide repeat
  Subcellular localization annotation: CTP_CleavageSite=64; ConfidenceScore=5.14e-01
MLMLVFHCAVFRWLGVLARHCPLTIRRNAAKGFLPAFGGFSFTISPGCPSQRNPSWANKVLPCHCRHVRSSHGCLLMVLKSTNADNADLRGALHRFAVHMDDDIILMVLQKQRSNWQVALAFFNWAATLPGYAHGSRAYTEMLDILGRMKKVRHMSQLFDEIPEER

SEQ ID NO: 79496 - protein, 292 aa, Zea mays
  Coding DNA Sequence Number=SeqID_37717
MSDCRTDVYVNEVLMVLKSTKADNADLRGALRRFAVHMDDDIILMVLQKQRSNWAYTEMLDILGRMKKVRHMRQLFDEIPEERGIIKGPVVRQRDDRHQSLLLLRHQCGRWRDQCPRLDSTYAQLADFHVDPPRQHIFLLPTGPTSAIPQRTCPTSHARLASAAARLARPPQSLPGSPMCTSDQSFGSHDNGAQICFAFPYALHPQIWQARQWRPRPRIAFPYALHPQIWKLGQWRLAPASCSPTCSRLQHCLLLCDAPTNLESTIYVTKLESTISVKQSQQLSPKFRARPH

SEQ ID NO: 79497 - protein, 138 aa, Zea mays
  Coding DNA Sequence Number=SeqID_37718
  Subcellular localization annotation: CTP_CleavageSite=43; ConfidenceScore=5.41e-01
MHPQIWKAQSTSPNWKARSRSSNHNNYPPNFALALIKKVAIPSSAHHRPLTPFCTHQRPGDYSSFAPLHGKYSRETRVSFSCKVAHHGILWTCRKKQSFNFHSYYLLSIVIACHQTKANGVVFLNFKTLNKLSILRDS

SEQ ID NO: 79498 - protein, 169 aa, Zea mays
  Coding DNA Sequence Number=SeqID_37719
MARNAHGAQWQGTNGDFWVAMEATSTVNEAPVRDSTAPRSTLYARWHQLGSRRAQEDAQTVDEVCETAARNPTRRAMDLRRCRSSRIRTHARIDEPRTEGPDFLDAREAPGLGRRGREAAHRDGGRGSVQSRRLCASRGGYGGARREVVREISGLTFMHHGGVRVGKIV

SEQ ID NO: 79499 - protein, 149 aa, Zea mays
  Coding DNA Sequence Number=SeqID_37720
MEATSTVNEAPVRDSTAPRSTLYARWHQLGSRRAQEDAQTVDEVCETAARNPTRRAMDLQRCRSSRIRTHARIDEPRTEGPDFLDAREAPGLGRGGREAAHRDGGRGSVQSRRLCASRGGYGGARREVVREISGLTFMHHGGVRVGKIV

SEQ ID NO: 79500 - protein, 91 aa, Zea mays
  Coding DNA Sequence Number=SeqID_37721
MARNGRCRTTPGDYQALDHGFYASRKHEGVEQRAFFCYQGTNGDFWVAMEATSTVNEAPVRDSTAPRSTLYARWHQLGSRRAQEDAQTVDE

SEQ ID NO: 79501 - protein, 201 aa, Zea mays
  Coding DNA Sequence Number=SeqID_37722
  Subcellular localization annotation: CTP_CleavageSite=51; ConfidenceScore=5.62e-01
MSGFISSSPFQNTKRFPQIQSLAPGIARRSSGRFQLRRQLRRAITPNPCIVCRIRGYRCVRLVEGFVAAVRFVDWIPESPAIDGFGFGSGEGLLPRHLPLSPHLPRRRRPSPSVSLPGDAPFSPPRRWRRWPAAALALPASHARTHPSPAAWPRPLALRAAAPTPGRPKPRPPLRSPLPFLSSLFHGWEEEDEERKKMTIL

SEQ ID NO: 79502 - protein, 143 aa, Zea mays
  Coding DNA Sequence Number=SeqID_37723
  Homolog annotation: Hit_ID=UPI00004C1733; Match level="QueryCoverage =47%, HitCoverage=5%, E-value=5e-34, Identity=100%"; Hit description =UPI00004C1733 related cluster
MDDVGEERHRLLGPDAVQGSDLDPLGEFVDGDQQVRVAPGCLLQGADEVQTPHRKRPGDGYRLQSLSGQSISHSPLTFPGGGAPSPSVSLPATPLFHSPAVAAVAGAPPPGPTTARTPPGNVGAPPHLYARPPPAGPASRGRR

SEQ ID NO: 79503 - protein, 91 aa, Zea mays
  Coding DNA Sequence Number=SeqID_37724
MEGEGPPPPGKVRGEWERLCTDGKTKKRRNPRCNNGGFSPGKKTLAGAEKKSVDCRRFGDPIDEPNALQRSLRRDERSGTLGFRRQCTDWE

SEQ ID NO: 79504 - protein, 79 aa, Zea mays
  Coding DNA Sequence Number=SeqID_37725
MEVSHRGRRPSPEPRRNPSIAGDSGIQSTNRTRCDEAFDETNAAVPSDSADDARIGSNCSPELSPELEPPRTSASNTGS

SEQ ID NO: 79505 - protein, 79 aa, Zea mays
  Coding DNA Sequence Number=SeqID_37726
MEVSHRGRRPSPEPRRNPSIAGDSGIQSTNRTRCDEALDETNAAVPSDSADDARIGSNCSPELSPELEPPRTSASNTES

SEQ ID NO: 79506 - protein, 358 aa, Zea mays
  Coding DNA Sequence Number=SeqID_37727
  Gene Ontology: Mol. function=threonine endopeptidase activity; Cellular component=proteasome core complex (sensu Eukaryota); Biological process=ubiquitin-dependent protein catabolic process
  Homolog annotation: Hit_ID=O81149; Match level="QueryCoverage=64%, HitCoverage=98%, E-value=1e-123, Identity=94%"; Hit description =Proteasome subunit alpha type 5-A
  Pfam annotation: Domain name=Proteasome; Domain location=152-339; Score=267.8; E_value=2.2e-77; Accession=PF00227.16; Description =Proteasome A-type and B-type
MEELGYSQGPRTDAVGAHCREFMMAMKFQMENHNPLHSQIAEVKMDISASASVAAGNKFCKGAACYFFDSTTPQQSYGFFWIEILGALVSIRLIWLLVGILLYEAISAAHLVSDAAEISLRASSCRTEYDRGVNTFSPEGRLFQVEYAIEAIKLGSTAIGLKTKDGVVLAVEKRVTSPLLEPSSVEKIMEIDEHIGCAMSGLIADARTLVEHARVETQNHRFSYGEPMTVESSTQAICDLALRFGEGDEESMSRPFGVSLLIAGHDENGPSLYYTDPSGTFWQCNAKAIGSGSEGADSSLQEQYNKELTLQEAETIALSILKQVMEEKVTPNNVDIAKVAPKYHLYTPAEVEAVIARL

SEQ ID NO: 79507 - protein, 180 aa, Zea mays
  Coding DNA Sequence Number=SeqID_37728
  Gene Ontology: Mol. function=cation transporter activity; Cellular component=membrane; Biological process=cation transport
  Homolog annotation: Hit_ID=Q84NH0; Match level="QueryCoverage=50%, HitCoverage=37%, E-value=5e-10, Identity=47%"; Hit description=Zinc transporter
MEELGYSQGPRTDAVGAHCREFMMAMKFQMENHNPLHSQIAEVKMDISASASVAAGNKFCKGAACYFFDSTTPQQSYGFFWIEILGALVSIRLIWLLVGILLYEAISAAHLVSDAAEISLRASSCRTEYDRGVNTFSPEGRLFQVEYAIEAIKLQMVTEIPFETQSTIRRYKRYLSSEAE

SEQ ID NO: 79508 - protein, 400 aa, Zea mays
  Coding DNA Sequence Number=SeqID_37729
  Homolog annotation: Hit_ID=Q84NH0; Match level="QueryCoverage=40%, HitCoverage=38%, E-value=5e-68, Identity=81%"; Hit description=Zinc transporter
MPTTTLLVFGVSCNASTFNEIGNRQGCCGASTTSTYSSKKADHIQKPSTLWPLLYLLDSLSSQYRAVAAASCLPNLPIAAPLRNATSGTAPSAGGWPGSRAHEAPPGGLVLVSKDPDNICEIATGMVVNPRPFIEVRSAAPNHIENALRDVVVPMVCIKSYCSGSSTPYSLLEFWYINDSYFCRLVGVTRFLSEPLHTMVVASMDWPEITKYRGLMENHNPLHSHIAEVKMDISASASIAIQNKFCKGVACYFSDSSNSSKDAKERSTSMRKLIIAVILCIIFMTMEVVGGIKANNLAILTDAAHLLSDVATFAISLFSLWVAGWEATPQQSYGFFWIEILGALVSIQLIWLLAGILLYEAIVRLINESGDVQGSLIFNESGDDSWDCTRGRTGRTTVHL

SEQ ID NO: 79509 - protein, 350 aa, Zea mays
  Coding DNA Sequence Number=SeqID_37730
  Homolog annotation: Hit_ID=Q6QP51; Match level="QueryCoverage=14%, HitCoverage=22%, E-value=2e-08, Identity=70%"; Hit description =Putative growth-regulating factor 1
  Subcellular localization annotation: CTP_CleavageSite=24; ConfidenceScore=5.16e-01
MVDPSLRSGEAATPPRPRLGPRPRVGRGRDSSRGRGRGRALGSGEAELLVAPEAELDRCRFRPGGWHSSRSRAGDAVFLSDRIRCQATPALSAHATRSAGKTIWPKSLARQGLYFAEPRVHSLSEETLGRGVDSSGTTVLPEAGLRRENSRGYHEKCPKTQTDTAADCGFYFKKYMVLLTKSLREGGGWIGDPRPQSRLRAVDSPPRDRYPTVERYRYHIIKSGPIIHASTTHAFSPILQLNTAAPLDYARWRMIGASPARRPLTRCQNNELQCVKEDSPNTRVDYLPAMACPGSRSAAECGPAVALQLRREIGAALKINPTRYYQGRFPGDATKLHDPSPRPKRRRSRS

SEQ ID NO: 79510 - protein, 54 aa, Zea mays
  Coding DNA Sequence Number=SeqID_37731
  Subcellular localization annotation: CTP_CleavageSite=28; ConfidenceScore=5.17e-01
MAPCRSGAHAWRSRHAFATPPPPRVHARPMPERGSGLSVFASRHPVFRPSCCTG

SEQ ID NO: 79511 - protein, 273 aa, Zea mays
  Coding DNA Sequence Number=SeqID_37732
MNHHCLIEVESVQRGVVSSQMPTKYKAQANTSSGLPVECGELQCHIKYVSGPLQSIYTMHSTPEIRGRSATVYIYDALYSRNMLASATASPLSKQTCDRVSVCASFFVVAACLTPDGGSCMHAFMPQTEQWGAAPSVRICFLKENDERGRAGNKRSAARHRARSLSDLKRGKKSSDWGRRFSLALALAMPMPPPAGARQLASQAAHGALSLRRTCMALAARLCDATTTTRPRPPNAGERVWSVRVVELRSVTRETSLVVSGGIDLQGGPNFSP

SEQ ID NO: 79512 - protein, 76 aa, Zea mays
  Coding DNA Sequence Number=SeqID_37733
MAMMGSTSEKMYLCQVKKRQTFVASVQRWYQRKSTRSKAAGGKDPPENFCLKLIGRGFCLPWFVIILCTRILCSGL

SEQ ID NO: 79513 - protein, 73 aa, Zea mays
  Coding DNA Sequence Number=SeqID_37734
MAMMGSTSEKMYLCQVKKRQTFVASVQRWYQRKSTRSKAAGGKDPPKNFCLILIRRGFCLPWCNTPGVTITKT

SEQ ID NO: 79514 - protein, 108 aa, Zea mays
  Coding DNA Sequence Number=SeqID_37735
MAENEEEVEVEEEKTSPPPPAEHQAGNCFYFDICGSEPDSPINEGKPVHLPGTKNKLDDGAIKALMGSTSEKMYLCQVKKRQNFVASVLRWYRRKNTRSKAAGGKDPP

SEQ ID NO: 79515 - protein, 237 aa, Zea mays
  Coding DNA Sequence Number=SeqID_37736
  Subcellular localization annotation: CTP_CleavageSite=85; ConfidenceScore=5.03e-01
MDALWAHFNRLVILNLYYTLRLERASTNLTVPPLQPPPALSSFLQSRPRPRRLPCIPPSTAPTSFPASRGDPALPSISPLMAPIVGGRVGEVARVSPVVVVSFGPTVGRYCFHPPALTSLLHLIPSPPPARLPAVHRSPPPAAIQPPVQGSSSRSQPCPVPSRREARRLGSWSEDKETRERMQQLQPKQMHWVRADSSDFGGRPSRPPQVSLWGSSAREITRVASRRAERVRGAPAP

SEQ ID NO: 79516 - protein, 40 aa, Zea mays
  Coding DNA Sequence Number=SeqID_37737
MKRFKAYTKEIWHSRVIQYWKHLKFEIQKDSFRYVMGYEC

SEQ ID NO: 79517 - protein, 53 aa, Zea mays
  Coding DNA Sequence Number=SeqID_37738
  Homolog annotation: Hit_ID=Q653G1; Match level="QueryCoverage=92%, HitCoverage=8%, E-value=2e-14, Identity=70%"; Hit description =Dehydration-responsive protein-like
MDRILRTYGYAIIRDKVDVVTYIKKLLPALRWDDWTFEMRPKKDALTTGDLAF

SEQ ID NO: 79518 - protein, 630 aa, Zea mays
  Coding DNA Sequence Number=SeqID_37739
  Homolog annotation: Hit_ID=Q653G1; Match level="QueryCoverage=25%, HitCoverage=26%, E-value=7e-72, Identity=80%"; Hit description =Dehydration-responsive protein-like
  Pfam annotation: Domain name=DUF248; Domain location=36-384; Score= -41.8; E_value=2.9e-23; Accession=PF03141.7; Description=Putative methyltransferase
MAPIVGGRVGEVARVSPVVVVSFGPTVGRYCFHPPALTSLLHLIPSPPPARLPAVHRSPPPAAIQPPVQGSSSRSQPCPVPSRREARRLGSWSEDKETRERMQQLQPKQMHWVRADSSDFGGDRPAPRSHQRHDASCEEDDLYGYGGIVNEWGTIGLLLLEAAAERIVGDGALETWGVTDKATRVKLCMCPCGGPARGRSHASRRAARNVFEERQLHSHLHRVVVAALSIQEIWHSRVIQYWKHLKFEIQKDSFRYVMDMSASLGGFAASLKKKNVWVMNVVPFTESGKLKIIYDRGLMGTTHDWCESFSTYPGTYDLLHAWLLFSEIEKQGCSLEDLLIEMDRILRTYGYAIIRDKVDVVTYIKKLLPALRWDDWTFEMRPKKDALTTGNIQFMPWGIDAVDKRYGVQIGPRENSDCLYIIPWGLYKAVTYVKEKYGNPTSPQCFMSENNVYLAKTFMLIFGMGLYCLFVSNASADVRSKAPDCPVCQRSNDYFAPTVVCEGIKCATVRACARRSQSRRQKAHRTVYRTCPVHHQTVRWPHKSELQRSNPNGQVMWLAHRTVRCAIRQQPPPTATLVVEAINTPNHPPFIASKFSAFSPLTRAIAFNTRHNQRDQILSQVRNHSKQISD

SEQ ID NO: 79519 - protein, 529 aa, Zea mays
  Coding DNA Sequence Number=SeqID_37740
  Homolog annotation: Hit_ID=Q653G1; Match level="QueryCoverage=30%, HitCoverage=26%, E-value=5e-72, Identity=80%"; Hit description =Dehydration-responsive protein-like
  Pfam annotation: Domain name=DUF248; Domain location=1-283; Score= -75.6; E_value=3.2e-21; Accession=PF03141.7; Description=Putative methyltransferase
MQQLQPKQMHWVRADSSDFGGDRPAPRSHQRHDASCEEDDLYGYGGIVNEWGTIGLLLLEAAAERIVGDGALETWGVTDKATRVKLCMCPCGGPARGRSHASRRAARNVFEERQLHSHLHRVVVAALSIQEIWHSRVIQYWKHLKFEIQKDSFRYVMDMSASLGGFAASLKKKNVWVMNVVPFTESGKLKIIYDRGLMGTTHDWCESFSTYPGTYDLLHAWLLFSEIEKQGCSLEDLLIEMDRILRTYGYAIIRDKVDVVTYIKKLLPALRWDDWTFEMRPKKDALTTGNIQFMPWGIDAVDKRYGVQIGPRENSDCLYIIPWGLYKAVTYVKEKYGNPTSPQCFMSENNVYLAKTFMLIFGMGLYCLFVSNASADVRSKAPDCPVCQRSNDYFAPTVVCEGIKCATVRACARRSQSRRQKAHRTVYRTCPVHHQTVRWPHKSELQRSNPNGQVMWLAHRTVRCAIRQQPPPTATLVVEAINTPNHPPFIASKFSAFSPLTRAIAFNTRHNQRDQILSQVRNHSKQISD

SEQ ID NO: 79520 - protein, 63 aa, Zea mays
  Coding DNA Sequence Number=SeqID_37741
  Subcellular localization annotation: CTP_CleavageSite=27; ConfidenceScore=5.01e-01
MDPSVSAWGSHVSEGRAEARARGAGMRARVVGARLRVSARERRVWAARRAFPEMGQIPDSKLH

SEQ ID NO: 79521 - protein, 76 aa, Zea mays
  Coding DNA Sequence Number=SeqID_37742
  Subcellular localization annotation: CTP_CleavageSite=27; ConfidenceScore=5.01e-01
MDPSVSAWGSHVSEGRAEARARGAGMRARVVGARLRVSARERRVWAARRAFLEMGQIPDWGNQLYKVELLCMAKLI

SEQ ID NO: 79522 - protein, 341 aa, Zea mays
  Coding DNA Sequence Number=SeqID_37743
MARRTQSTVRRGITAPMSNPVFEGRRQAREIPATASRDHGGTRISAGWLEGRFTDSDGWPASISHALLLSSAAESGRKTADEMDPSVSAWGSHVSEGRAEARARGAGMRARVVGARLRVSARERRVWAARRAFPEMGQIPEDAEKRNRQLHVDLTTAQARVAALESREVIVVEALKQAKDEHVQKLMEAYLVTRNQRRALRIQEPASSNPVQPMRAEDPQIFEGHPVSIRGEKKTWELPKGAIVLEGIPVFPQAMNKQEHPKSSQDPPPELFEPLTMKKIPTPSREIKEEVASTPASPPSEELQEPVVLEEEFDPVLPSQSPPEEVINISSLLTHPGDVSD

SEQ ID NO: 79523 - protein, 279 aa, Zea mays
  Coding DNA Sequence Number=SeqID_37744
  Subcellular localization annotation: CTP_CleavageSite=42; ConfidenceScore=5.36e-01
MDSPNRKQGRPACSSLTLTARLVGVGLLLFSSDSRRRLGAASAQRADGTGSLATGSMETSVADVNLDGANLAVGTTNGLVRIYKLREHNGGSSFNFVSEFKQDHSVDTNTREILEILVLWFFFNLLWWQGTILGAYMRWLKFFEIWLTGNNAYDCYLIFFSETIVEVEKKTELEEEADVLSEIEEEKLESELDAGEGSSERSDGPRGIHQAFSVMSTSFMKSGVLVQEGFTKPFQSCQEHHVRPQGEGDRHGNCFSLPTSDIAKVFQDKLELQPGLSPK

SEQ ID NO: 79524 - protein, 467 aa, Zea mays
  Coding DNA Sequence Number=SeqID_37745
  Homolog annotation: Hit_ID=Q9LT87; Match level="QueryCoverage=7%, HitCoverage=4%, E-value=7e-09, Identity=84%"; Hit description =Similarity to serine/threonine kinase
MGATRTAPAHGLPEQEAGQARVLLPHPDGAAPSPFRICRPFAGAVMDPSDFNSAAGSRAGPACSSLTLTARLVGVGLLLFSSDSRRRLGAASAQRADGTGSLATGSMETSVADVNLDGANLAVGTTNGLVRIYKLREHNGGSSFNFVSEFKQDHSVDTNTREILEILVLWFFFNLLWWQGTILGAYMRWLKFFEIWLTGNNAYDCYLIFFSETIVEVEKKTELEEEADVLSEIEEEKLESELDAGEGSSERSDGPRGIHQAFSVMSTSFMKSGVLVQEGFTKPFQSCQEHHVRPQGEGDRHGNCFSLPTSDIAKEYLHFFCNPPLCHRDIKSSNILLYEHFVAKVQNICTRLPKKKSYKDLYWLNWRFLLCALWVYSCMALAFFLIKKYEGASSPDSNGDDGGDREEALPRVRPGVVYLEDCWKTCLEGIHPGWLLAFRVVAFFVLASLLVVDIITDGWSIFLYYTQ

SEQ ID NO: 79525 - protein, 158 aa, Zea mays
  Coding DNA Sequence Number=SeqID_37746
MALAFFLIKKYEGASSPDSNGDDGGDREEALPRVRPGVVYLEDCWKTCLEGIHPGWLLAFRVVAFFVLASLLVVDIITDGWSIFLYYTQTGKCRIFTFCVGYPGRPGCGIVQYGQQLQQGEKDRHQVLKDFSKLLDDQALGQQWLPVKKKECRLCMDI

SEQ ID NO: 79526 - protein, 177 aa, Zea mays
  Coding DNA Sequence Number=SeqID_37747
MALAFFLIKKYEGASSPDSNGDDGGDREEALPRVRPGVVYLEDCWKTCLEGIHPGWLLAFRVVAFFVLASLLVVDIITDGWSIFLYYTQTGKCRIFTFCVGYPGRPGCGIVQYGQQLQQGEKDRHQVLKDFSKLLDDQPCVRLQCWLNPTSLNHSITIETDASGSGAVAGSPSISLH

SEQ ID NO: 79527 - protein, 362 aa, Zea mays
  Coding DNA Sequence Number=SeqID_37748
MRRRNIGPGRHEHLVARVRDDEGPALLQPVQYGQQLQQGEKDRHQVLKDFSKLLDDQIFAPNCFSRTAVATCKKNRALLRKLSLVDLAGVSLVGAMDTTSVYVGIPCDIPFNSGCNVGLMDEGIVAAMAYPIIHATCEQDIAKGGARTEEDLNVSDEMIFEARVRSEQQAVIGIFLNRLPSISHFIPFTLDYFVLYEMLNDQIASKGKSNRGRKFKDVSKQPEDMDDSFGSRMKPYLQIGSSSWKQLARQVDLSARQRFLGSSDTSSSSSSPRLAAALLQHGDCSAKDDGVQDPMAEIVRLTSCNVNELEYLRAEDMKEQPYEAKRELTKDPELYCTDSVSPLLGLGTLLHLFNSNFYMDIN

SEQ ID NO: 79528 - protein, 179 aa, Zea mays
  Coding DNA Sequence Number=SeqID_37749
  Gene Ontology: Mol. function=zinc ion binding; Cellular component =proteasome core complex (sensu Eukaryota); Biological process =ubiquitin-dependent protein catabolic process
  Homolog annotation: Hit_ID=P30186; Match level="QueryCoverage=27%, HitCoverage=19%, E-value=1e-17, Identity=87%"; Hit description =Proteasome subunit alpha type 7-A
MARYDRAITVFNPDGHLFQVEYALQAVRKGNTVVGVRGTDTIVLSVEKKCASHIATNYHMLAPNTKRGCVCHFIVKRLIVEPSMDKMAVGTKAMFAPYISDELRLQVMSLLYVGIPVETIMQRHTKMVEKQEVHQTGTIFLLIDMLGDWKGKYVVLFMSLMMMTLLVLAYGLKITRIVV

SEQ ID NO: 79529 - protein, 75 aa, Zea mays
  Coding DNA Sequence Number=SeqID_37750
  Gene Ontology: Mol. function=threonine endopeptidase activity; Cellular component=proteasome core complex (sensu Eukaryota); Biological process=ubiquitin-dependent protein catabolic process
  Homolog annotation: Hit_ID=P30186; Match level="QueryCoverage=64%, HitCoverage=19%, E-value=8e-18, Identity=89%"; Hit description =Proteasome subunit alpha type 7-A
MARYDRAITVFSPDGHLFQVEYALEAVRKGNIVVGVRGMDTIVLSVEKKFFRYRHLCLGHPDRLAAIANDSVWQP

SEQ ID NO: 79530 - protein, 100 aa, Zea mays
  Coding DNA Sequence Number=SeqID_37751
  Gene Ontology: Mol. function=threonine endopeptidase activity; Cellular component=proteasome core complex (sensu Eukaryota); Biological process=ubiquitin-dependent protein catabolic process
  Homolog annotation: Hit_ID=P30186; Match level="QueryCoverage=53%, HitCoverage=21%, E-value=8e-21, Identity=88%"; Hit description =Proteasome subunit alpha type 7-A
  Subcellular localization annotation: CTP_CleavageSite=35; ConfidenceScore=5.22e-01
MPPREPPARRLPAAIPSPSPPRTPPHTPPPSVGKQAQTLTAGDASTMARYDRAITVFNPDGHLFQVEYALQAVRKGNTVVGVRGTDTIVLSVEKKSTPKL

SEQ ID NO: 79531 - protein, 132 aa, Zea mays
  Coding DNA Sequence Number=SeqID_37752
  Gene Ontology: Mol. function=structural constituent of ribosome; Cellular component=ribonucleoprotein complex; Biological process =translation
  Homolog annotation: Hit_ID=Q9FLF0; Match level="QueryCoverage=88%, HitCoverage=48%, E-value=3e-29, Identity=68%"; Hit description=40S ribosomal protein S9-2
MVSLVRDRTSLIMCFALTVENFLQRRLQTIVFKNGMAKSIHHARVLIRLTDKLQFSNLDLWDFCHQGVLKHFHRVGRQPVNIPSFMVRVESEKHIDFSLTSPLGGGPAGRVKRKNQKASGGGGGGDGEEDDE

SEQ ID NO: 79532 - protein, 257 aa, Zea mays
  Coding DNA Sequence Number=SeqID_37753
  Gene Ontology: Mol. function=structural constituent of ribosome; Cellular component=ribonucleoprotein complex; Biological process =translation
  Homolog annotation: Hit_ID=Q9FLF0; Match level="QueryCoverage=69%, HitCoverage=80%, E-value=2e-69, Identity=77%"; Hit description=40S ribosomal protein S9-2
  Pfam annotation: Domain name=Ribosomal_S4; Domain location=48-149; Score=94.5; E_value=3.2e-25; Accession=PF00163.9; Description =Ribosomal protein S4S9 N-terminal domain
MTAASARPARRRVSCIGLANTTAQSDNSSFDIVLAYFRSLYIFHQNSIRLLHFVNMLAHMLSADKRLDAELKLVGEYGLRCKRELWRVQYALSRIRNAARELLTLDEKNPRRIFEGEALLRRMNRYGLLGEGQNKLDYVLALTVENFLQRRLQTIVFKNGMAKSIHHARVLIRLTDKLQFSNLDLWDFCHQGVLKHFHRVGRQPVNIPSFMVRVESEKHIDFSLTSPLGGGPAGRVKRKNQKASGGGGGGDGEEDDE

SEQ ID NO: 79533 - protein, 189 aa, Zea mays
  Coding DNA Sequence Number=SeqID_37754
  Gene Ontology: Mol. function=structural constituent of ribosome; Cellular component=ribonucleoprotein complex; Biological process =translation
  Homolog annotation: Hit_ID=Q9FLF0; Match level="QueryCoverage=64%, HitCoverage=61%, E-value=4e-52, Identity=85%"; Hit description=40S ribosomal protein S9-2
  Pfam annotation: Domain name=Ribosomal_S4; Domain location=48-149; Score=94.5; E_value=3.2e-25; Accession=PF00163.9; Description =Ribosomal protein S4S9 N-terminal domain
MTAASARPARRRVSCIGLANTTAQSDNSSFDIVLAYFRSLYIFHQNSIRLLHFVNMLAHMLSADKRLDAELKLVGEYGLRCKRELWRVQYALSRIRNAARELLTLDEKNPRRIFEGEALLRRMNRYGLLGEGQNKLDYVLALTVENFLQRRLQTIVFKNGMAKSIHHARVLISGKMNNLGDKTLNVWNV

SEQ ID NO: 79534 - protein, 50 aa, Zea mays
  Coding DNA Sequence Number=SeqID_37755
  Gene Ontology: Mol. function=transporter activity; Cellular component= intracellular; Biological process=transport
  Homolog annotation: Hit_ID=Q6Z7A1; Match level="QueryCoverage=90%, HitCoverage=14%, E-value=5e-16, Identity=80%"; Hit description =Putative SEC14 cytosolic factor
  Pfam annotation: Domain name=CRAL_TRIO_N; Domain location=2-40; Score= 10.6; E_value=0.0031; Accession=PF03765.5; Description=CRALTRIO, N -terminus
MHHGYPKETLVRFLKAREWNVAKAHKMIVECLNWRIQNEIDSVLEQYHSQ

SEQ ID NO: 79535 - protein, 92 aa, Zea mays
  Coding DNA Sequence Number=SeqID_37756
  Gene Ontology: Mol. function=transporter activity; Cellular component= intracellular; Biological process=transport
  Homolog annotation: Hit_ID=Q6Z7A1; Match level="QueryCoverage=76%, HitCoverage=21%, E-value=7e-30, Identity=84%"; Hit description =Putative SEC14 cytosolic factor
  Pfam annotation: Domain name=CRAL_TRIO_N; Domain location=2-40; Score= 8.9; E_value=0.0049; Accession=PF03765.5; Description=CRALTRIO, N -terminus
MHQGYPKETLVRFLKAREWNVAKAHKMIVECLNWRIQNEIDSVLERPIAPVDLYKSIRDSQLIGLSRYTKEILLYNFDGGTICSVVILKGLD

SEQ ID NO: 79536 - protein, 240 aa, Zea mays
  Coding DNA Sequence Number=SeqID_37757
  Gene Ontology: Mol. function=transporter activity; Cellular component= intracellular; Biological process=transport
  Homolog annotation: Hit_ID=Q6Z7A1; Match level="QueryCoverage=55%, HitCoverage=49%, E-value=8e-51, Identity=63%"; Hit description =Putative SEC14 cytosolic factor
  Pfam annotation: Domain name=CRAL_TRIO_N; Domain location=37-101; Score=28.1; E_value=2.4e-05; Accession=PF03765.5; Description =CRALTRIO, N-terminus
MGLGMAMGRVRIGYGPAGKMLNPYPTRFYHGSGMDKTRGLNFVPEPETDGSDIRGYPNPRNMHHGYPKETLVRFLKAREWNVAKAHKMIVECLNWRIQNEIDSVLERPITPVDLYRSICDSQLIGLSGYTKEGLPIFGIGVGHSTYDKASATTTAKIIKVSGLKLSALSQIKMLTSISAVDDLNYPEGLRTWVPTFLRRGYRRTYCAVLADPRRVKNVGTVELIVQSTQISAGHISSTAT

SEQ ID NO: 79537 - protein, 178 aa, Zea mays
  Coding DNA Sequence Number=SeqID_37758
MAGARISRDPLWHPGHVRALIGSRTGLTSPSCLPTLATATVVEIESGAKQRVGEIAPRGRRRWNPYLAHAASLVCFLSASLRHWEDARAPGKEKVAVGCGKLLTGVRGLPPSRLNVWAGPSPLHTEAYASEVSILLYRTSKFIGCTEEISILPLGDDDSLGAPKVHPMGVAPELRVDF

SEQ ID NO: 79538 - protein, 135 aa, Zea mays
  Coding DNA Sequence Number=SeqID_37759
MAGARISRDPLWHPGHVRALIGSRTGLTSPSCLPTLATATVVEIESGAKQRVGEIAPRGRRRWNPYLAHAASLVCFLSASLRHWEDARAPGKEKVAVGCGKLLTGVRGLLPSRLNVWAGPSPLHTEVMRPPTDSP

SEQ ID NO: 79539 - protein, 183 aa, Zea mays
  Coding DNA Sequence Number=SeqID_37760
MSQRCTQEANQRRGVGEVRVPPPAVARGNLPHSLFRSRLYLHYGGGRKSRKARGRGKPGPATYKGADVAGMPQRIARNPRARHARTYVDGDGADTGGSTSQRQKARVRASREGDGASAGGDRPVGPVLHTASRALARTIELQSVTPSYSKKHLRGNPGCAVRPKTPIVGDGPKKIHVKKLQWS

SEQ ID NO: 79540 - protein, 113 aa, Zea mays
  Coding DNA Sequence Number=SeqID_37761
MPQRIARNPRARHARTYVDGDGADTGGSTSQRQKARVRASREGDGASAGGDRPVGPVLHTASRALARTIELQSVTPSYSKKHLRGNPGCAVRPKTPIVGDGPKKIHVKKLQWS

SEQ ID NO: 79541 - protein, 77 aa, Zea mays
  Coding DNA Sequence Number=SeqID_37762
MELTQGGPPASGRRRESALHVLHTASRALARTIELQSVTPSYSKKHLRGNPGCAVRPKTPIVGDGPKKIHVKKLQWS

SEQ ID NO: 79542 - protein, 116 aa, Zea mays
  Coding DNA Sequence Number=SeqID_37763
  Subcellular localization annotation: CTP_CleavageSite=36; ConfidenceScore=5.15e-01
METLWALFAFSPIGTNNRLEGLHFKSSQKSLLSSTCAFSEVSLVLVSPYALETYTSSAIFGFHLISVGIFLLSRGIHCVYCMDVTAWENLLKILGHPPNGCRQGTAWCAERLANCF

SEQ ID NO: 79543 - protein, 160 aa, Zea mays
  Coding DNA Sequence Number=SeqID_37764
  Subcellular localization annotation: CTP_CleavageSite=15; ConfidenceScore=5.23e-01
MRPLQSSTSFRKPATVSEKGNIGIPRLKSHRSMMDPRTSVYVAPLPPLPLSGRTIAKLPKSSVVNKEHYWVKRKVIKGRTCLRLEILSRPILAQFRCTWPLRGKVHASEVSILHCRNLKFIGCTEDNPLEGLHFKSSQKLLLSSTCAFSEVHTMGVAPEL

SEQ ID NO: 79544 - protein, 111 aa, Zea mays
  Coding DNA Sequence Number=SeqID_37765
MRPLQSSTSFKKTATVSEKGNIGIPRPKSHHNMVDLAPFGLTNEGGEIETSETAPISEVMRRSGLVIQEGEGSFLEKDSVNTEAENVDAEAGSDDEEDDGILSPSNSLQMP

SEQ ID NO: 79545 - protein, 448 aa, Zea mays
  Coding DNA Sequence Number=SeqID_37766
  Homolog annotation: Hit_ID=Q0PW29; Match level="QueryCoverage=26%, HitCoverage=33%, E-value=8e-60, Identity=91%"; Hit description=GRP -like protein 2
  Pfam annotation: Domain name=RGP; Domain location=180-447; Score =128.7; E_value=1.6e-35; Accession=PF03214.4; Description=Reversibly glycosylated polypeptide
  Subcellular localization annotation: CTP_CleavageSite=32; ConfidenceScore=5.42e-01
MEGPPPAALFFARNPPARRPFHPRPRQIRRPCAKSAATPLLADGRTTPPKPSSKSALCKWWHSLAPALLAAALAVTVAALRPTTEHADAKGRPPLWFGPGGVFKVALFADLHYGEDAWTDWGPAQDAASDRVMAAVLDAENPGACLRTLSFCSPGPFPFSSERIKELKRNSLSASWSLRRRNPIHTSSLRLGGVRAAIDVQTSLLEEDLNKNYQEDKRQYTPLVKNGEVGDDPGGSIHGVLPVMVPEIGMKFQDEVAKDPSGKDINALEQHIKNLLSPSTPFFFNTLYDPYRVGADFVRGYPYSLREGVPTVVSHGLWLNIPDYDAPTQLLKPLERNTRYVDAILTIPKGTLFPMCGMNLAFDRELIGPAINFPLPLFHLSSISPCPRWDSGERLPPIVEPRGDDEDNDGFDYGYDYDYGLWYYFRLKKREDEVVVEDFQEFQEYEEF

SEQ ID NO: 79546 - protein, 403 aa, Zea mays
  Coding DNA Sequence Number=SeqID_37767
  Homolog annotation: Hit_ID=Q0PW29; Match level="QueryCoverage=29%, HitCoverage=33%, E-value=7e-60, Identity=91%"; Hit description=GRP -like protein 2
  Pfam annotation: Domain name=RGP; Domain location=135-402; Score =128.7; E_value=1.6e-35; Accession=PF03214.4; Description=Reversibly glycosylated polypeptide
TTPPKPSSKSALCKWWHSLAPALLAAALAVTVAALRPTTEHADAKGRPPLWFGPGGVFKVALFADLHYGEDAWTDWGPAQDAASDRVMAAVLDAENPGACLRTLSFCSPGPFPFSSERIKELKRNSLSASWSLRRRNPIHTSSLRLGGVRAAIDVQTSLLEEDLNKNYQEDKRQYTPLVKNGEVGDDPGGSIHGVLPVMVPEIGMKFQDEVAKDPSGKDINALEQHIKNLLSPSTPFFFNTLYDPYRVGADFVRGYPYSLREGVPTVVSHGLWLNIPDYDAPTQLLKPLERNTRYVDAILTIPKGTLFPMCGMNLAFDRELIGPAINFPLPLFHLSSISPCPRWDSGERLPPIVEPRGDDEDNDGFDYGYDYDYGLWYYFRLKKREDEVVVEDFQEFQEYEEF

SEQ ID NO: 79547 - protein, 193 aa, Zea mays
  Coding DNA Sequence Number=SeqID_37768
  Gene Ontology: Mol. function=alpha-1,4-glucan-protein synthase (UDP -forming) activity; Cellular component=cellulose and pectin -containing cell wall; Biological process=cellulose biosynthetic process
  Homolog annotation: Hit_ID=Q0PW29; Match level="QueryCoverage=61%, HitCoverage=33%, E-value=2e-60, Identity=91%"; Hit description=GRP -like protein 2
  Pfam annotation: Domain name=RGP; Domain location=1-192; Score=67.3; E_value=5.1e-17; Accession=PF03214.4; Description=Reversibly glycosylated polypeptide
VAKDPSGKDINALEQHIKNLLSPSTPFFFNTLYDPYRVGADFVRGYPYSLREGVPTVVSHGLWLNIPDYDAPTQLLKPLERNTRYVDAILTIPKGTLFPMCGMNLAFDRELIGPAINFPLPLFHLSSISPCPRWDSGERLPPIVEPRGDDEDNDGFDYGYDYDYGLWYYFRLKKREDEVVVEDFQEFQEYEEF

SEQ ID NO: 79548 - protein, 75 aa, Zea mays
  Coding DNA Sequence Number=SeqID_37769
MAWHGWALLLRSCPRARWERATAAVVPTWPSGPRERTGKWGARWAGGWRGALGYRAGQGKLGHARRRGCGPAERG

SEQ ID NO: 79549 - protein, 202 aa, Zea mays
  Coding DNA Sequence Number=SeqID_37770
  Subcellular localization annotation: CTP_CleavageSite=68; ConfidenceScore=5.67e-01
SLGLLGSPARLSTLWPTWRPTSRSAPLAHSARQALRPRSLAPSVRVGRSAGAAPSHARPWTHLSAECRAPLVKTIFPQPPTLVSPGRSLPAPHFLRAWAFPGAMRVDSANYSILLSLPGHRAAAVLSLCRPLSGHSREPLLVGCPDTTAMAEPSAKSSSRTEPLCSHYRRQASVSGRASTSHAPPTNLASVVFLPLRQSTRI

SEQ ID NO: 79550 - protein, 92 aa, Zea mays
  Coding DNA Sequence Number=SeqID_37771
  Subcellular localization annotation: CTP_CleavageSite=79; ConfidenceScore=5.60e-01
MAMAEPSAQSSSRTEPLCSHYRRQASVSGRASTSHAPPTNLVPVVFLPLRQSTRIGENPLPSLSLYCNECVQIGSQRSSAMAIFGPLFVASI

SEQ ID NO: 79551 - protein, 224 aa, Zea mays
  Coding DNA Sequence Number=SeqID_37772
MATGRLLRAVLGRQSRQGNARGHGEMELRILSSTYGASIWWGCGEKEIGALLLAAQAMEQKGALGGDELLLEFLGAVDRELGDHGSRIGSCTAGKTGAQGGSRAASIAEGEARAHGREDGREGAGEQGRAPWLLGAPAPWKWREEEDLLTGLGEKGIAEQDQGDNDRMWGRRTLLLRHGARRRELCVWERRKKRVAAGKSGGAPKLVVSRDRLTPNSVNFHEKA

SEQ ID NO: 79552 - protein, 201 aa, Zea mays
  Coding DNA Sequence Number=SeqID_37773
MPATDRELAGTGGLNITTGMRRGGHDVTTAGRGHDKNYPEVVVDVVEDERRAGRGLSIASVSIVSVGHGLATANLVMARAGHGLATASTRCGNGSTSAGHGVATQDQATDRVADVISRHEKCDTPGVYFASCREINPNLGCSVKISISRSCLSLFIRLSLGSSPNSELIDREKQPILEPVKNFYSQHECKLENHSRIINLI

SEQ ID NO: 79553 - protein, 137 aa, Zea mays
  Coding DNA Sequence Number=SeqID_37774
MRARPPPSPGFGVDEGPTATIVLIGSWSLTRDNNATPRVEWDTLGQVIRKARERSPYPKGASGEASLLEYREVLGSNCCDGSSDEGFLCFLRPETVVGILELGELWKGLVVLPCLASLVEVYGVRTTLWQMGNTTCG

SEQ ID NO: 79554 - protein, 1022 aa, Zea mays
  Coding DNA Sequence Number=SeqID_37775
  Gene Ontology: Mol. function=structural constituent of ribosome; Cellular component=intracellular; Biological process=translation
  Homolog annotation: Hit_ID=Q6YS36; Match level="QueryCoverage=77%, HitCoverage=82%, E-value=4e-85, Identity=26%"; Hit description =Putative fertility restorer homologue
  Pfam annotation: Domain name=PPR; Domain location=118-152; Score =16.3; E_value=0.087; Accession=PF01535.11; Description=PPR repeat
  Pfam annotation: Domain name=PPR; Domain location=190-224; Score =33.3; E_value=8.6e-07; Accession=PF01535.11; Description=PPR repeat
  Pfam annotation: Domain name=PPR; Domain location=225-259; Score =29.9; E_value=8.7e-06; Accession=PF01535.11; Description=PPR repeat
  Pfam annotation: Domain name=PPR; Domain location=260-294; Score =42.7; E_value=1.3e-09; Accession=PF01535.11; Description=PPR repeat
  Pfam annotation: Domain name=PPR; Domain location=295-329; Score =43.9; E_value=5.6e-10; Accession=PF01535.11; Description=PPR repeat
  Pfam annotation: Domain name=PPR; Domain location=330-364; Score =30.5; E_value=6e-06; Accession=PF01535.11; Description=PPR repeat
  Pfam annotation: Domain name=PPR; Domain location=365-399; Score =31.9; E_value=2.2e-06; Accession=PF01535.11; Description=PPR repeat
  Pfam annotation: Domain name=PPR; Domain location=400-434; Score =45.5; E_value=1.9e-10; Accession=PF01535.11; Description=PPR repeat
  Pfam annotation: Domain name=PPR; Domain location=435-469; Score =35.5; E_value=1.9e-07; Accession=PF01535.11; Description=PPR repeat
  Pfam annotation: Domain name=PPR; Domain location=470-504; Score =25.8; E_value=0.00016; Accession=PF01535.11; Description=PPR repeat
  Pfam annotation: Domain name=PPR; Domain location=505-539; Score =30.7; E_value=5.2e-06; Accession=PF01535.11; Description=PPR repeat
  Pfam annotation: Domain name=PPR; Domain location=540-574; Score =25.8; E_value=0.00016; Accession=PF01535.11; Description=PPR repeat
  Pfam annotation: Domain name=PPR; Domain location=575-609; Score =45.0; E_value=2.5e-10; Accession=PF01535.11; Description=PPR repeat
  Pfam annotation: Domain name=PPR; Domain location=610-644; Score =46.2; E_value=1.1e-10; Accession=PF01535.11; Description=PPR repeat
  Pfam annotation: Domain name=PPR; Domain location=645-679; Score =29.9; E_value=8.9e-06; Accession=PF01535.11; Description=PPR repeat
  Pfam annotation: Domain name=PPR; Domain location=680-714; Score=6.1; E_value=1.4; Accession=PF01535.11; Description=PPR repeat
  Pfam annotation: Domain name=PPR; Domain location=715-749; Score =37.8; E_value=3.8e-08; Accession=PF01535.11; Description=PPR repeat
  Pfam annotation: Domain name=PPR; Domain location=750-784; Score =31.9; E_value=2.3e-06; Accession=PF01535.11; Description=PPR repeat
  Pfam annotation: Domain name=PPR; Domain location=785-819; Score =37.1; E_value=6.3e-08; Accession=PF01535.11; Description=PPR repeat
  Pfam annotation: Domain name=PPR; Domain location=820-854; Score =30.8; E_value=4.7e-06; Accession=PF01535.11; Description=PPR repeat
  Pfam annotation: Domain name=PPR; Domain location=855-889; Score =40.1; E_value=7.4e-09; Accession=PF01535.11; Description=PPR repeat
  Pfam module annotation: Pfam domain module=PPR::PPR::PPR::PPR::PPR::PP R::PPR::PPR::PPR::PPR::PPR::PPR::PPR::PPR::PPR::PPR::PPR::PPR::PP ::PP R::PPR; Domain
  Pfam module annotation: Domain location=365-399::400-434::435 -469::470-504::505-539::540-574::575-609::610-644::645-679::680 -714::715-749::750-784::785-819::820-854::855-889
  Subcellular localization annotation: CTP_CleavageSite=68; ConfidenceScore=5.81e-01
MAGAASPPQALPPAPTLQASFLCSLALAFLRAGRLSAASHVVSSLPAPPPARLLRRLIPALASSGLVAAASRFRPVPGDPLTLNSIILSYCSLHALRPALSLLRSSSGPQPQVAADTVSYNIFLAGLSEQGHGRLAPPVLSEMCKRGVPWDGVTMSTALVGLSRTGLVGEAAALAEMLVRGRGIDGLGVVGWNALIDGYCKVQDMAAALAVVERMTTQGLSLDVVGYNTLVAGFFYSGDADAAWEVAERMKADGVEPSVVTHTTLIGEYCKMKRIEEAFTLYEGMVRSGVLPDVVTLSALVDGLCRDGRFSEAYALFREMDKIGVAPNHVTYCTFIDSLAKVQRVNESLGLLGEMVSRGVAMDLVMYTTVMDRLGKEGKIEEAKDVLRHALSDNITPNCVTYTVLVDAHCRAGNIDGAEQMLLQMEEKSVSPNVVTFSSILNGLVKRGCIAKAAGYMRKMKDSGIAPNVVTYGTLIDGFFKCQGQEAALDVYRDMLHEGVEANNFIVDSLVNGLRKNGNIEEAEALFKDMGERGLLLDHVNYATLMDGLFKTGNMPAALKVGQELMERNLSPDAVVYNVFINCLCRLGKFSEAKSFLKEMRNTGLEPDQATYNTMISAQCREGNTSKALKLLNEMKWSSIKPNLITYTTLVVGLLEAGVVEKAKYLLNEMASAGFTPTPLTYRRVLQACSGSRSPYVILEVHELMMGAGLHADITVYNTLVHVLCCHGMTRKATIVLDEMLGRGIAPDTITFNALILGHCKSSHLDNAFATYAQMLHQGLSPNIATFNTLLGGLESAGRIGEADTVICEMKKMGLEPNNLTYDILVTGYAKKSNKVEALRLYCEMVSKGFIPKASTYNSLISDFAKAGMMNQAKELFSEMKRRGVLHTSSTYDILLNGWSKLRNGTEPLAASPSPSPHFYFFLHVVVPKRVGRRCLRGSKCAAEAAPVRSCSTHALRAAREHLRNGRGLLMEDHSVPMKPKVPCPKDDSTVEALLLVFVDLIDHSSPPLHKGGLHRTRNKVS

SEQ ID NO: 79555 - protein, 450 aa, Zea mays
  Coding DNA Sequence Number=SeqID_37776
  Homolog annotation: Hit_ID=Q10RU8; Match level="QueryCoverage=76%, HitCoverage=42%, E-value=1e-104, Identity=61%"; Hit description=DENN domain containing protein, expressed
MEDHSVLMKPKAPCPKDDSTVEALLLVFVDLIDHSFPPLHKGGLHRTRNKVSDNAPLYGVCLHVQEIVQKAPVLRMWWCVYSMNSIIAQERLDRITQFASEITLAEPVPRPIKEQDGVDGDFDSSNGIPYIDWTEYAVPVNSISGLISSSSIPSERDMSSYLFRSWEPNSSQSISGSEISDSSYVREVEEARHSFQHYEDCIVENLEPRCDSFGRASYMYDNGHTSPDLLSMHSPASSRLERAQSVESLESSVKGATSDEEYEVNVKHEVIVDDEKVVGWAKAHNNEPLQIVCGYHALHLPPRGGELVFRPLEHLQPVKYSRPGLPLLGFGEEILDNALTRAEKNKLLFSPEGARLIHWSFAGEANCGNMPKSGCSVSNSFVYYTDDKAVPVAKSVASGSLVELIRWSEQQSSGPEFDSTCLRPITDRGRSHIGYDACGAGISGFLDLCK

SEQ ID NO: 79556 - protein, 678 aa, Zea mays
  Coding DNA Sequence Number=SeqID_37777
  Homolog annotation: Hit_ID=Q10RU8; Match level="QueryCoverage=87%, HitCoverage=58%, E-value=1e-104, Identity=61%"; Hit description=DENN domain containing protein, expressed
MEDHSVPMKPKAPCPKDDSTVEALLLVFVDLIDHSFPPLHKGGLHRTRNKVSDNAPLYGVCLHVQEIVQKAPVLRMWWCVYSMNSIIAQERLDRITQFASEITLAEPVPRPIKEQDGVDGDFDSSNGIPYIDWTEYAVPVNSISGLISSSSIPSERDMSSYLFRSWEPNSSQSISGSEISDSSYVREVEEARHSFQHYEDCIVENLEPRCDSFGRASYMYDNGHTSPDLLSMHSPASSRLERAQSVESLESSVKGATSDEEYEVNVKHEVIVDDEKVVGWAKAHNNEPLQIVCGYHALHLPPRGGELVFRPLEHLQPVKYSRPGLPLLGFGEEILDNALTRAEKNKLLFSPEGARLIHWSFAGEANCGNMPKSGCSVSNSFVYYTDDKAVPVAKSVASGSLVELIRWSEQQSSGPEFDSTCLRPITDRGRSHIGYDACGAGISGFLDLCFFDHSNCVLKLGYLDIVTKGYLDIVTFFSNDSMRGASPVMAAGDISLSVSPISLFVVFRCDCGDVKILPRKLIDFLDAPVPFIAGVQHKPPDIKMKGSSLVRVNVQKDQASPRHVHCLDFHITRSSFLISVHFMPDYRADVAWKFLNIMRTYLESLCSDLRFHTITNVQSNNDRVSLLLKDSFIDSFPSNDRPFIKGIGKIKTRHVAWSAEDFDFAEATSLIRSVLKSI

SEQ ID NO: 79557 - protein, 220 aa, Zea mays
  Coding DNA Sequence Number=SeqID_37778
  Gene Ontology: Mol. function=cholestenol delta-isomerase activity; Cellular component=endoplasmic reticulum; Biological process=sterol metabolic process
  Homolog annotation: Hit_ID=Q2TU57; Match level="QueryCoverage=96%, HitCoverage=95%, E-value=2e-83, Identity=68%"; Hit description =Sterol-8,7-isomerase
  Pfam annotation: Domain name=EBP; Domain location=20-219; Score =310.0; E_value=4.2e-90; Accession=PF05241.2; Description=Emopamil binding protein
  Subcellular localization annotation: CTP_CleavageSite=25; ConfidenceScore=5.02e-01
MGGHGHPYSPAELQLPGFVPQRLSQAQIVAPFAGTAVLAVLGAWLVSGRCGGGGRLSRTDRLLMGWWLFTALTHLVFEPPFLFTPDFFSKENPNYFDDLFKEYSKGDSRYAARDTAIVALEAITVGLKGPASLLAVYAIASRKPYGHILQFAVSLGQLYGCLFYFVTAYLDGFSFWASPFYFWAYFVGNNSLWVVIPTLVATRSWKKISAAFQADKVKTR

SEQ ID NO: 79558 - protein, 333 aa, Zea mays
  Coding DNA Sequence Number=SeqID_37779
  Gene Ontology: Mol. function=cholestenol delta-isomerase activity; Cellular component=endoplasmic reticulum; Biological process=sterol metabolic process
  Homolog annotation: Hit_ID=Q2TU57; Match level="QueryCoverage=65%, HitCoverage=98%, E-value=9e-84, Identity=67%"; Hit description =Sterol-8,7-isomerase
  Pfam annotation: Domain name=EBP; Domain location=133-332; Score =310.0; E_value=4.2e-90; Accession=PF05241.2; Description=Emopamil binding protein
  Subcellular localization annotation: CTP_CleavageSite=79; ConfidenceScore=5.20e-01
MGTLPGGFFAECPTWHSAKMEFLPSAAWKTLGKANFFAAAVSVTRRRNDRFSLPSAVWHSAKSFAECPRKSTRQRRLCRCTVRQAFFAECNTRASAKPLPSVFKDSPKHEAAAMGGHGHPYSPAELQLPGFVPQRLSQAQIVAPFAGTAVLAVLGAWLVSGRCGGGGRLSRTDRLLMGWWLFTALTHLVFEPPFLFTPDFFSKENPNYFDDLFKEYSKGDSRYAARDTAIVALEAITVGLKGPASLLAVYAIASRKPYGHILQFAVSLGQLYGCLFYFVTAYLDGFSFWASPFYFWAYFVGNNSLWVVIPTLVATRSWKKISAAFQADKVKTR

SEQ ID NO: 79559 - protein, 334 aa, Zea mays
  Coding DNA Sequence Number=SeqID_37780
  Gene Ontology: Mol. function=cholestenol delta-isomerase activity; Cellular component=endoplasmic reticulum; Biological process=sterol metabolic process
  Homolog annotation: Hit_ID=Q2TU57; Match level="QueryCoverage=65%, HitCoverage=98%, E-value=2e-85, Identity=68%"; Hit description =Sterol-8,7-isomerase
  Pfam annotation: Domain name=EBP; Domain location=133-333; Score =301.9; E_value=1.2e-87; Accession=PF05241.2; Description=Emopamil binding protein
  Subcellular localization annotation: CTP_CleavageSite=79; ConfidenceScore=5.20e-01
MGTLPGGFFAECPTWHSAKMEFLPSAAWKTLGKANFFAAAVSVTRRRNDRFSLPSAVWHSAKSFAECPRKSTRQRRLCRCTVRQAFFAECNTRASAKPLPSVFKDSPKHEAAAMGGHGHPYSPAELQLPGFVPQRLSQAQIVAPFAGTAVLAVLGAWLVSGTRCGGGGRLSRTDRLLMGWWLFTALTHLVFEPPFLFTPDFFSKENPNYFDDLFKEYSKGDSRYAARDTAIVALEAITVGLKGPASLLAVYAIASRKPYGHILQFAVSLGQLYGCLFYFVTAYLDGFSFWASPFYFWAYFVGNNSLWVVIPTLVATRSWKKISAAFQADKVKTR

SEQ ID NO: 79560 - protein, 274 aa, Zea mays
  Coding DNA Sequence Number=SeqID_37781
  Homolog annotation: Hit_ID=Q6J9W0; Match level="QueryCoverage=69%, HitCoverage=49%, E-value=5e-58, Identity=65%"; Hit description =Putative RNA-binding protein
MNVKTRVAQRRHARFLPLAYVVRSMSRGSIGSPPERGAGVYANRSGSHQTRAGHVSAPDPRSWLRPGRPQFLVAHGSAIPPPSRTPSVLHQRPQVLPLPITAPPAPTAPLPIARGGAAPRRLLGLTDDSSCSDLLPLFPVPGGHTAFLLCDLPPPSPLTPRIPASESCLSPAAVSSVFSEFRDPAPSPTTPDDAVAAHDEPRDLGFDDDDSFDADSILCSVNQSAAEGIDGIMGKLSMENNEASGSSSSVDSNMLGSKMHPYLRNLMVLGLSFR

SEQ ID NO: 79561 - protein, 234 aa, Zea mays
  Coding DNA Sequence Number=SeqID_37782
  Homolog annotation: Hit_ID=Q6J9W0; Match level="QueryCoverage=80%, HitCoverage=49%, E-value=8e-58, Identity=65%"; Hit description =Putative RNA-binding protein
MGLGRVSYGLEREEEAYIVIPESDIWRRPQFLVAHGSAIPPPSRTPSVLHQRPQVLPLPITAPPAPTAPLPIARGGAAPRRLLGLTDDSSCSDLLPLFPVPGGHTAFLLCDLPPPSPLTPRIPASESCLSPAAVSSVFSEFRDPAPSPTTPDDAVAAHDEPRDLGFDDDDSFDADSILCSVNQSAAEGIDGIMGKLSMENNEASGSSSSVDSNMLGSKMHPYLRNLMVLGLSFR

SEQ ID NO: 79562 - protein, 200 aa, Zea mays
  Coding DNA Sequence Number=SeqID_37783
  Subcellular localization annotation: CTP_CleavageSite=32; ConfidenceScore=5.02e-01
MGRILGHLPSMAWLPWHVMGKRGRRSSDPWVRARSPSIDRAGLWRRGARTTGMCERGEDRGIASMAWTSIAGAGRRGQLGASDGGRAAWVPVVVGEASGGLASVAERGEDHRESVPRPGKRARSKRGGGVHHGRDPRVGSMRGHREVEHRQRERRCGEEGRGSAAPSIGGKRTFHPRGIGRIVHHSIVDAYTLLLRSSRE

SEQ ID NO: 79563 - protein, 242 aa, Zea mays
  Coding DNA Sequence Number=SeqID_37784
  Gene Ontology: Mol. function=structural constituent of cell wall; Cellular component=cell outer membrane
  Homolog annotation: Hit_ID=UPI00006A1DCC; Match level="QueryCoverage =83%, HitCoverage=50%, E-value=7e-07, Identity=32%"; Hit description =UPI00006A1DCC related cluster
MAEQSGGRRDGADPRPPSIDGLAAMACDGEGKGGGCSVRAPSRAGGADGWQQSRAEGGADPMQRGRRSSDPWVRARSPSIDRAGLWRRGARTTGMCERGEDRGIASMAWTSIAGAGRRGQLGASDGGRAAWVPVVVGEASGGLASVAERGEDHRESVPRPGKRARSKRGGGVHHGRDPRVGSMRGHREVEHRQRERRCGEEGRGSAAPSIGGKRTFHPRGIGRIVHHSIVDAYTLLLRSSRE

SEQ ID NO: 79564 - protein, 66 aa, Zea mays
  Coding DNA Sequence Number=SeqID_37785
MGSHDPRAKWESRLMGKPNGAFAEYVDVHSSLLYHKTPGCPHCNLYSGEDEVMEGDFQEFQDYDEF

SEQ ID NO: 79565 - protein, 80 aa, Zea mays
  Coding DNA Sequence Number=SeqID_37786
MGSTGTVLALPRLSAEVLSFCFLLVTLLRGEPNGAFAEYVDVYSSLLYHKTLGCPHCNHYSGEDEAVEGDFQEFQDYDEF

SEQ ID NO: 79566 - protein, 109 aa, Zea mays
  Coding DNA Sequence Number=SeqID_37787
MVDKAIQANSGDSDDEKVCMLNQVTGCVGSYSCGMQLPSDLISNCPTTVHPMKAISSVLLMLIHWSSLCCVLPGGAEPSLSEKDQKERVQMSKFVRGLVLSTIFDDDNL

SEQ ID NO: 79567 - protein, 64 aa, Zea mays
  Coding DNA Sequence Number=SeqID_37788
MPMCGVDFKWTGRWLTKPSRQTLAIVMMKRAEPSLSEKDQKERVQMSKFVRGLVLSTIFDDDNL

SEQ ID NO: 79568 - protein, 84 aa, Zea mays
  Coding DNA Sequence Number=SeqID_37789
  Subcellular localization annotation: CTP_CleavageSite=46; ConfidenceScore=5.05e-01
MGLGFIAEKANIHGLQIFNTKASISQVTRWTGRWLTKPSRQTLAIVMMKRAEPSLSEKDQKERVQRSKFVRGLVLSTKFDDDNL

SEQ ID NO: 79569 - protein, 160 aa, Zea mays
  Coding DNA Sequence Number=SeqID_37790
  Gene Ontology: Mol. function=hydroxymethylglutaryl-CoA reductase (NADPH) activity; Cellular component=endoplasmic reticulum; Biological process=isoprenoid biosynthetic process
  Homolog annotation: Hit_ID=Q42466; Match level="QueryCoverage=44%, HitCoverage=12%, E-value=7e-27, Identity=85%"; Hit description=3 -hydroxy-3-methylglutaryl-CoA reductase
MFAASLVYLMRRWREKIRASTPLHVVSLAEIFAICGVVACLIYLLSFFGIAFVQSVVSNSDDEEDFIIDSRHGQASWLGGRVRSVLPSALNKRTKTMPMCGVDFKWTGRWLTKPSRQTLAIVMMKRAEPSLSEKDQKERVQMSKFVRGLVLSTIFDDDNL

SEQ ID NO: 79570 - protein, 353 aa, Zea mays
  Coding DNA Sequence Number=SeqID_37791
  Homolog annotation: Hit_ID=Q42466; Match level="QueryCoverage=31%, HitCoverage=20%, E-value=1e-36, Identity=74%"; Hit description=3 -hydroxy-3-methylglutaryl-CoA reductase
MWQPSDSDTRLEGNGTTLGLGPRLGTLKNAKFTEWQTNAARFPGVGSEPTMITDQSIGDGLGLGVATTAPCVWCLGSWSISVAQWDIESDDEDLDDEVDDGAEDEDLCLYYTESFYKEWEFMANISGPCRFISNTQDGSCVVRPEEIPKVLEISGKSSLIDNFFFSYHGSAAARELPTAPAGDRRRGAAGACAGGGRAADPAHEPHLLGAGDALPLPIRHTNLIFSVMFAASLVYLMRRWREKIRASTPLHVVSLAEIFAICGVVACLIYLLSFFGIAFVQSVVSNSDDEEDFIIDSRHGQASWLGGRVRSVLPCGSACCLRFRPVCFRGLVRKSEGVAMRCCGGGEKLTPRR

SEQ ID NO: 79571 - protein, 85 aa, Zea mays
  Coding DNA Sequence Number=SeqID_37792
MGRSKPGCGPRLSLSFKDAYHPCWGGEQVKGTPRPLFDEPKPGVAVSAQTEAELAQKEDLVGQSLAGSSTGETDARMSCRGLGPG

SEQ ID NO: 79572 - protein, 207 aa, Zea mays
  Coding DNA Sequence Number=SeqID_37793
MNKRPAFKVPLQTELRFRPRGYEQPPHRGACGATSSGRLASDLCSSSYGPKTDAATGRLSFASPLKGREPDIKAKEPGVGLTDNGVRLSTNAALANAGRSKAHQQVLAPVLATKTRKRAECCILAGQQQFAFPGMAGGRLLHRAGGWFHHQKLEEEVASRPVREVEPRFASPSIPARMVSILEAEGGAGAAARLASPHPWAGGHRPR

SEQ ID NO: 79573 - protein, 262 aa, Zea mays
  Coding DNA Sequence Number=SeqID_37794
MTVSTASIPVLHSAEVAHLYPQVMLPICQGITTSHTPLPRRRGKVTLRGLYKVPLASENPLQFIGSSNAGFLPDRHRSKINQGPPYTDHSPTALAPFGCQRFIYNYTNSTVRNTVDYSGQEKLFGKTGQARTVRAFAADRPRHEDAPRTEPMQKYKYPLQTVRRKSKDRLSPCADRPASGADRPPLIYRGGPSGPGTRTVRAQQNGATARRWLVAINTTPTTSIHFIQAFQPSTFNTRASNPFQDTFKASISPSFTIEERDH

SEQ ID NO: 79574 - protein, 60 aa, Zea mays
  Coding DNA Sequence Number=SeqID_37795
MEALNVSWNGLLALVLNVEGWNAWMKLGCWIRGYLLSSSLLRHEDVLSVSKVTVYRIAMN

SEQ ID NO: 79575 - protein, 170 aa, Zea mays
  Coding DNA Sequence Number=SeqID_37796
MLPLPPFPLFPVFIFFLNPLFQGLRERFSHCNSNMDMGQLNHNPTGQQDSLLTVWLRRVQGVLHDDQTELCLMHRIKAAIIRGSSFDADCTIIGIHPSSNNLPAPHDSERISNQGSAAAPEVSVLKTRIQPNDEAQQEVQTRSIPDPREVAGCLLHMLLQQSRPMLCLIL

SEQ ID NO: 79576 - protein, 157 aa, Zea mays
  Coding DNA Sequence Number=SeqID_37797
  Gene Ontology: Mol. function=aspartate-tRNA ligase activity; Cellular component=cytoplasm; Biological process=tRNA aminoacylation for protein translation
  Homolog annotation: Hit_ID=Q6ZHC3; Match level="QueryCoverage=55%, HitCoverage=15%, E-value=5e-16, Identity=54%"; Hit description =Putative aspartate-tRNA ligase
MPRGQGPRAPSPNFGTLRNRDRLSKKQQKKDARKAEKAETVAQPQQQHLFNTEDLFAANYGDVAVEEIQLKAISDRLWSQISDLDDSAAGCKQGRTQRVVYVSDAIQPLSFGNSRYARVQELCYVCSKVFQIEEDFRQARVYDQVGNTELIQEAINL

SEQ ID NO: 79577 - protein, 251 aa, Zea mays
  Coding DNA Sequence Number=SeqID_37798
MAWSKEKVFTLQLKHGRGPGAPHDRDRLSKKQQKKDARKAEKAETVAQPQQQHLFNTEDLFAANYGDATIELNHNPTGQQDSLLTVWLRRVQGVLHDNQTELYLMHRIKAAIIHGSSFDTDCTIIGIHPSSNNLPAPHDSERISNQGSAAAPEVSVLKTRIQPNDEAQQEVQTRSIPDPREVAGCLLHMLLQQSRPMLCLILLSTVYQLVTQYGRIPVYHTFCGGFWNYFSLDLQKIKLRKCLASESMEGE

SEQ ID NO: 79578 - protein, 124 aa, Zea mays
  Coding DNA Sequence Number=SeqID_37799
  Homolog annotation: Hit_ID=Q6ZHC3; Match level="QueryCoverage=35%, HitCoverage=8%, E-value=8e-07, Identity=65%"; Hit description =Putative aspartate-tRNA ligase
MTSHADDSTTRPTAGAEGQEDEDVQHHRPFITGFAITGFIVIKMTTNFTEEDLKNSKKVMVGRDPFVFRQLEWAPRDRDRLSKKQQKKDARKAEKAETVAQPQQQHLFNTEDLFAANYGDVTVE

SEQ ID NO: 79579 - protein, 136 aa, Zea mays
  Coding DNA Sequence Number=SeqID_37800
  Homolog annotation: Hit_ID=Q9AYP0; Match level="QueryCoverage=26%, HitCoverage=62%, E-value=4e-08, Identity=69%"; Hit description =Mitochondrial ATP synthase 6 KD subunit
MSCVGEAPTPILLGALLGRLQPDLSLISPHSVAICILFLKIFTGCLPNCLCASVRSVASRRSPRHLGTSPRMTSHADDSTTRPTAGAEGQEDEDVQHHRPFITGFAITGFIVIKMTTNFTEEDLKNSKFIQEHKRR

SEQ ID NO: 79580 - protein, 1193 aa, Zea mays
  Coding DNA Sequence Number=SeqID_37801
  Gene Ontology: Mol. function=DNA topoisomerase (ATP-hydrolyzing) activity; Cellular component=microtubule associated complex; Biological process=microtubule-based movement
  Homolog annotation: Hit_ID=Q7Y1U0; Match level="QueryCoverage=97%, HitCoverage=95%, E-value=0.0, Identity=69%"; Hit description=Kinesin- like calmodulin binding protein
  Pfam annotation: Domain name=Band_41; Domain location=229-416; Score=- 64.8; E_value=0.0027; Accession=PF00373.8; Description=FERM domain (Band 4.1 family)
  Pfam annotation: Domain name=DUF593; Domain location=576-664; Score= -31.6; E_value=0.081; Accession=PF04576.6; Description=Protein of unknown function, DUF593
  Pfam annotation: Domain name=Kinesin; Domain location=812-1139; Score= 501.2; E_value=1.2e-147; Accession=PF00225.13; Description=Kinesin motor domain
  Pfam annotation: Domain name=MyTH4; Domain location=77-191; Score =161.6; E_value=2e-45; Accession=PF00784.8; Description=MyTH4 domain
  Pfam module annotation: Pfam domain module=Band_41::DUF593::Kinesin::M yTH4; Domain location=229-416::576-664::812-1139::77-191
MQKQIHSAGKRGFFSKKSVGPQTREKFTLEDMLCFQKDSIPTSLLKISNDLVSRSIKLFHVILKYMGIDSPAIISLEERIEFVEKLYKHTLKRSELRDELFAQISKQTRNNPDRGWSIRAWELMYLCASSMPPSKDIGAYLSEYIHFVAHGATTDADVRVLALNTLNALKRSVKAGPRITIPAWEEIEALLTSRKLTTIVFFLDETFEEITYDMATTVADAVEELAGIIKLSVYSSFSLFECRKVVNGSKSSEIGNEEYIGLDDNKYIGDLLSEFKSAKDRNKGEILHCKLVFKKRLFRESDEAVTDPMFVQLSYVQLQHDYILGNYPVGRDDASQLSALQILVEIGFIDNPESCVEWISLLERFLPRQVAITRAKRDWELDIISRFQLMEHLSKDDARQQFLRILRTLPYGNSVFFSVRKIDDPIGLLPGKIILGINKRGVHFFRPVPKEYLHSAELRDIMQFGSSNTAVFFKMRVAGVLHIFQFETKQGEEICVALQTHINDVMLRRYSKARSGNSVTSQNDVNQAYKPPNIEMFEKRVQELTKTAEDSQKKADQLREDLQLKTKQETEMQEELEGLRDTLQSERQSSKDIKNELDKLKSLCDEKESALQAALMEKSRLETRLTSGQGRERDTLTTVGSINNDIEMLAKLEEELKSYQKELDASKEVSKKLMLEKNILDQKVQRLERMKNEEKSAMEKVYADECCKLKSQIAELEQKLEVATRSLNVAESNLAVRNAEVDSLQNSLKELDELREFKADVDRKNQQTVEILKRQGAQLVELENLYKQEQVLRKRYYNTIEDMKGKIRVFCRLRPLSDKELSFEEKNIVCSPDEFTISHPWKDEKSKQHIYDRVFDANTSQEEVFEDTKYLVQSAVDGYNVCIFAYGQTGSGKTFTIYGSENNPGLTPRATSELFRVIKRDGNKYSFSLKAYMVELYQDNLVDLLLPRNAKQLKLEIKKDSKGVVTVENVTVVSISSIEELRAIISRGSERRHTAGTNMNDESSRSHLILSIIIESTNLQTQSYARGKGRIDSVSLFEQLSFVDLAGSERVKKSGSAGKQLKEAQSINKSLSALADVIGALSSDGQHIPYRNHKLTMLMSDSLGGNAKTLMFVNVSPAESNLEETYNSLMYASRVRCIVNDTSKHVAPKEIMRLKKLIAYWKEQAGKRSDEDELEEIQEERISKERSDNRMTS

SEQ ID NO: 79581 - protein, 100 aa, Zea mays
  Coding DNA Sequence Number=SeqID_37802
MSNAIDVKIKEKPRLSSVWHTGLSGGALDSVWCARLNSAAVFVVTQLNIVKGSICHTDRSEQTEEGVETDSKPRIFLRQELQFRGNLLEGFFTPLRSFFE

SEQ ID NO: 79582 - protein, 422 aa, Zea mays
  Coding DNA Sequence Number=SeqID_37803
HLERLHHRLHEEQEHRRQEQEQQGSSFSLQQEIESVRSCSPVLPLEAPPAPPLGAPAPRVAAGGDPDDGGGDDSSSHDADFPAGQEPEGWVARPITLVVAHGCHFHNALDTLLRRALNRVLGLSSIAVWSTSIVAGSTRTAGSSETTDQAKDRGKKSFEVPSAREKVKEAEEPKAKGEEEGLQSQGLNSGEQAALGRSLATYGYNSPDCPVVHRTVRRGSVVTQLNIVKGSICHTDRSEQTEEGVEIDSKPRISDSAATYSKSLLTPLRIKSSSRILFPGQRELSERDSAEAAMQDVARRALLHYCSVLDGVADGLDLKYYPRRPSGSTGGVIVSPVGDDNPRLSSTVNLAAVLNTELDHALDELSRARAEISLLRAERAERRHLDDGSPTPVGTQHPYRSPRRGHRSYGNPDCKTKINLEP

SEQ ID NO: 79583 - protein, 82 aa, Zea mays
  Coding DNA Sequence Number=SeqID_37804
MTSRELRARRKLGACARLSRGHIYTRKQGEGHRGKRRGAARSTMEVGASQELGGRWGWARTATRARCKEAERHIITAGTTTP

SEQ ID NO: 79584 - protein, 70 aa, Zea mays
  Coding DNA Sequence Number=SeqID_37805
MTSRELRARRKLGACARLSRGHIYTRKQGERAPRQAQGSSAVNHGSRGKPGARREMGLGAHGHQSTVQGG

SEQ ID NO: 79585 - protein, 546 aa, Zea mays
  Coding DNA Sequence Number=SeqID_37806
MHVVDDFLKCRIMPLQRRPRLCCWFTGPNDIGRIQRGPGLRTAILATLPTLDDSGVAVCQTGGRDPFRGIQIPGVPAGGLQPAGTAPCAGPAAAPSPLEKGKGAASSVSAPGGTGGSEEERRRRLRRADGSIVSDTPRSVRGLLVGPRRPAPRPRARRGASILRASSSTAPKATPPPPGTRPTDGSGSQQQESAESGAGGPPPAAAQTAPAASHAPAGGPAAVAPASSGVAATEEVPARGSAPASDIAPTPDVGGDTGAASSSNPTPAPEEMEVVFGRRLRSGAEEEAAPIPLPRMLSRAHQLEELTRTVSRQFISERSQLEWDHKEYNKDLQKVYARELEAHQREKMVARREEVVSQREALVTEFRAKLSALDQILEEQREEMLTRRGEMLAEHELEAEKKEKELEERIRQFQATQAALGLQAVEATRKALEDLQAEHHTEIQRIAAWAGKASSTLVPLGMSPIPVLELPTSISDALPMLDSTADRLRRLDQILGARLEAEGGKLCRVPVIAGPVADTEDAAREGIQDAMELVVERFQRDPADDE

SEQ ID NO: 79586 - protein, 363 aa, Zea mays
  Coding DNA Sequence Number=SeqID_37807
  Subcellular localization annotation: CTP_CleavageSite=48; ConfidenceScore=5.24e-01
MGPALSSRNLLRVVPAVRLQPLLRQRQRLLMPPAGGPAAVAPASSGVAATEEVPARGSAPASDIAPTPDVGGDTGAASSSNPTPAPEEMEVVFGRRLRSGAEEEAAPIPLPRMLSRAHQLEELTRTVSRQFISERSQLEWDHKEYNKDLQKVYARELEAHQREKMVARREEVVSQREALVTEFRAKLSALDQILEEQREEMLTRRGEMLAEHELEAEKKEKELEERIRQFQATQAALGLQAVEATRKALEDLQAEHHTEIQRIAAWAGKASSTLVPLGMSPIPVLELPTSISDALPMLDSTADRLRRLDQILGARLEAEGGKLCRVPVIAGPVADTEDAAREGIQDAMELVVERFQRDPADDE

SEQ ID NO: 79587 - protein, 102 aa, Zea mays
  Coding DNA Sequence Number=SeqID_37808
MRQEMVAALAVVAQQSNRESTTPIDPSSIVPTKPPEFIPADSPAPAPSSANNVRTPDTNNKKDNMPANYISSYTLRNAVTRRVQARGNKRSECVWNANVLVL

SEQ ID NO: 79588 - protein, 175 aa, Zea mays
  Coding DNA Sequence Number=SeqID_37809
  Homolog annotation: Hit_ID=Q10R89; Match level="QueryCoverage=60%, HitCoverage=24%, E-value=2e-34, Identity=74%"; Hit description=Kelch motif family protein, expressed
MEFLRTEDISYTIEIINGNNYMDSQVAAVAARREKRDVGREKESWGGKEKENQVAEGIVRLRGKLQWLSRWRLREVESVSCHCRVDGGLKTVVSARKFVPGAKLCMQPDIIPNKRKSRSSRKERSKTQSPLLPGLPDELAISCLMRAARIEHPNMRLVCKRWNPTFVWKLLLLLA

SEQ ID NO: 79589 - protein, 546 aa, Zea mays
  Coding DNA Sequence Number=SeqID_37810
  Gene Ontology: Mol. function=protein binding
  Homolog annotation: Hit_ID=Q10R89; Match level="QueryCoverage=76%, HitCoverage=95%, E-value=0.0, Identity=77%"; Hit description=Kelch motif family protein, expressed
  Pfam annotation: Domain name=F-box; Domain location=188-235; Score =28.8; E_value=1.9e-05; Accession=PF00646.23; Description=F-box domain
  Pfam annotation: Domain name=Kelch_1; Domain location=279-325; Score =22.0; E_value=0.0021; Accession=PF01344.15; Description=Kelch motif
  Pfam annotation: Domain name=Kelch_1; Domain location=327-374; Score =55.9; E_value=1.4e-13; Accession=PF01344.15; Description=Kelch motif
  Pfam module annotation: Pfam domain module=F-box::Kelch_1::Kelch_1; Domain location=188-235::279-325::327-374
MPRAPWQVVRSWSVYGSTLSVGQIIVGNVERGPKDEGHPGPTGPHLSGRCVRGKPSWRLKRKAKFEGVPRPLFSIRNACGRRRRPAAACGGEKRDVGREKESWGGKEKENQVAEGIVRLRGKLQWLSRWRLREVESVSCHCRVDGGLKTVVSARKFVPGAKLCMQPDIIPNKRKSRSSRKERSKTQSPLLPGLPDELAISCLMRAARIEHPNMRLVCKRWNRLLSGNYYYSLRKKFGMAEEWIYVFKRDRDQKLSWYAFDPVNQLWKSLPPVPPEYSEAVGFGSAVLNGCYLYLFGGKDPVHGSMRRVVFYNARINKWLRAPDMLQKRHFFGSCVINNCLYVAGGECVGIQRILRSAEVYDPNRNRWSSIAEMSTGMVPSIGVVHDGKWYLKGLNSHRQVVSEVYLPASKMWSATGNEMVTGWRNPSISLNGHLYSADCRDGCKLRVYNREMGSWTRFIDTRHHMGSSRSLEAAAFVSLNGKLCIIRNNMSITIVDILDPTTATEVDSARMWEAFARKGQHRSSFMANLWLIITGRNLKTDIMHCQ

SEQ ID NO: 79590 - protein, 199 aa, Zea mays
  Coding DNA Sequence Number=SeqID_37811
  Gene Ontology: Mol. function=hydrolase activity; Cellular component =cytoplasm; Biological process=protein amino acid dephosphorylation
  Homolog annotation: Hit_ID=Q8S7U0; Match level="QueryCoverage=98%, HitCoverage=55%, E-value=3e-78, Identity=69%"; Hit description =Serine/threonine protein phosphatase PP2A-4 catalytic subunit
  Pfam annotation: Domain name=Metallophos; Domain location=89-198; Score=56.1; E_value=1.2e-13; Accession=PF00149.18; Description =Calcineurin-like phosphoesterase
MDPMNVDNGGCGGLDAQIEQLMQCRPLAEQEGTLRVSRLLFGALFGWKCDPVFRWFGGYLNLFWYLVKALCEKAKEILMEESNVQPVKSPVTICGDIHGQFHDLVELFRIGGKCPDTNYLFMGDYVDRGYYSVETVTLLVALKVRYPHRITILRGNHESRQITQVYGFYDECLRKYGNANVWKTFTDLFDYFPLTALAT

SEQ ID NO: 79591 - protein, 466 aa, Zea mays
  Coding DNA Sequence Number=SeqID_37812
  Gene Ontology: Mol. function=hydrolase activity; Cellular component =protein phosphatase type 2A complex; Biological process=negative regulation of tyrosine phosphorylation of Stat3 protein
  Homolog annotation: Hit_ID=Q8S7U0; Match level="QueryCoverage=70%, HitCoverage=93%, E-value=1e-161, Identity=80%"; Hit description =Serine/threonine protein phosphatase PP2A-4 catalytic subunit
  Pfam annotation: Domain name=Metallophos; Domain location=89-284; Score=142.7; E_value=1e-39; Accession=PF00149.18; Description =Calcineurin-like phosphoesterase
MDPMNVDNGGCGGLDAQIEQLMQCRPLAEQEGTLRVSRLLFGALFGWKCDPVFRWFGGYLNLFWYLVKALCEKAKEILMEESNVQPVKSPVTICGDIHGQFHDLVELFRIGGKCPDTNYLFMGDYVDRGYYSVETVTLLVALKVRYPHRITILRGNHESRQITQVYGFYDECLRKYGNANVWKTFTDLFDYFPLTALVESEIFCLHGGLSPSIENLDSVRSLDRVQEVPHEGPMCDLLWSDPDDRCGWGISPRGAGYTFGQDISEQFNHTNNLKLVARAHQLVMEGYNWAHEQKVVTIFSAPNYCYRCGNMASILEVDDCNSHTFIQGQTEITGEYQSTMRNLRSSLPLVSARDVCNPERKQLCQAMPEFQPFQRPKRVRIVRRSEIQWLERFNAGERFQTVDLGSVGRLRISVGATVDLIRTIGFESDGSYPPIPLRAAQLQTNPGLSSNQPTTYPLIKITANRS

SEQ ID NO: 79592 - protein, 109 aa, Zea mays
  Coding DNA Sequence Number=SeqID_37813
MALGKEGNLGTGKDIFAECHCQGTRQRDWQRGPLEGTGSGAHWVSLCRGPLEQTLGNIDLFAECHRRHSAKDPSPLLGAVTGLRNRGRVGDWAVACGPVAWGYFDGLVN

SEQ ID NO: 79593 - protein, 129 aa, Zea mays
  Coding DNA Sequence Number=SeqID_37814
MALGKEGNLGTGKDIFAECHCQGTRQRDWQRGPLEGSLPSTCPTDTRQRSLLCRVPTRALGTGTSSGAHWVSLCRGPLEQTLGNIDLFAECHRRHSAKDPSPLLGAVTVTFLYGVPFGTRQSLCRVPDK

SEQ ID NO: 79594 - protein, 178 aa, Zea mays
  Coding DNA Sequence Number=SeqID_37815
  Gene Ontology: Mol. function=hydrolase activity
  Homolog annotation: Hit_ID=Q69XQ2; Match level="QueryCoverage=81%, HitCoverage=84%, E-value=8e-31, Identity=76%"; Hit description =Protein N-terminal asparagine amidohydrolase protein-like
MLLLDGDLVLSSSGSTGAASRTSDSGRELVAALLESPGIRHAVDRLKVAPERRISAGQEGAPKHVYVFQREYATVDPARVELVGTDEATTCIGVVIRNNKTGMMPDWADIASSLNQLSDSEVLLRCSTSPAAEPPHFVENERRIWKYLIDNPDWEETFPKHKPRVFHRASDGSWSRYS

SEQ ID NO: 79595 - protein, 265 aa, Zea mays
  Coding DNA Sequence Number=SeqID_37816
  Gene Ontology: Mol. function=hydrolase activity
  Homolog annotation: Hit_ID=Q69XQ2; Match level="QueryCoverage=90%, HitCoverage=56%, E-value=8e-68, Identity=58%"; Hit description =Protein N-terminal asparagine amidohydrolase protein-like
MLLLDGDLVLSSSGSTGAASRTSDSGRELVAALLESPGIRHAVDRLKVAPERRISAGQEGAPKHVYVFQREYATVDPARVEVNFVFLSKSSLLLSRQRAQLVGTDEATTCIGVVIRNNKTGMTSVSHMDFPEIVEGGIKQMLELLGDDNAPFDVCIFNCGFNMGCTLCTFQAFSLVVRSSGKKHIKQEGYSYPLCCKIVEVLHKSQLQFHLRSFCVLENNTKSDSFGNALPIIGGFVVETSSGVVIPATFDMDSRCPDEVVRRIR

SEQ ID NO: 79596 - protein, 96 aa, Zea mays
  Coding DNA Sequence Number=SeqID_37817
  Subcellular localization annotation: CTP_CleavageSite=42; ConfidenceScore=5.32e-01
MATRADISGRGAGIRWPGPTPVPAPTRLQLLRLRLRRRRCLTVAARSEKHGSRMHVVIQIQKLWQNNRNDIKLQVYLRLERDQKYKCDAKANAKSA

SEQ ID NO: 79597 - protein, 100 aa, Zea mays
  Coding DNA Sequence Number=SeqID_37818
MEEMTTKDDPKARKMFIGGLPPSLTEEKDLIVLAKTGFGRTGAFVLPILQELPILQVKYSRCLFSESLVTESFYLTKIVCLPNKNSEWIGFRRSTSTCTI

SEQ ID NO: 79598 - protein, 255 aa, Zea mays
  Coding DNA Sequence Number=SeqID_37819
MQLRPWLALVTLGCPPRRCRRRALHVPRREGSTFSDLHPAPSKLVTAIPSVGAGARLLRRTHLPQHFAYAHQVGVKRTVSMEEMTTKDDPKARKMFIGGLPPSLTEEKDLIVLAKTGFGRTGAFVLPILQELPILQVKYSRCLFSASLVIESFYLTKIVCLPNKNSEWIGFRRSTSTCFNYSKSEDDLKQFHLAFITRILAAILNPWDLDLTTFPNRICSPYYQNSLDLTTCCDTKSMALLPEFFELSRVEGNFT

SEQ ID NO: 79599 - protein, 151 aa, Zea mays
  Coding DNA Sequence Number=SeqID_37820
  Homolog annotation: Hit_ID=Q1G1I8; Match level="QueryCoverage=45%, HitCoverage=7%, E-value=3e-14, Identity=60%"; Hit description =Pentatricopeptide repeat protein
MATECFECHSRSGVAWRRMLECAVPPAYQLDHVYRFIKGLFVFHGLKCRWGRVGNFSGRVLENLCTVRLGDGRKGRARAEERARWVEAGVVREARSPWHKGREDARREFRRVLESRPEDWQAVVSAFERIPKVVASLIDHLSISITRPYTC

SEQ ID NO: 79600 - protein, 102 aa, Zea mays
  Coding DNA Sequence Number=SeqID_37821
  Homolog annotation: Hit_ID=Q1S316; Match level="QueryCoverage=54%, HitCoverage=9%, E-value=3e-07, Identity=50%"; Hit description =Pentatricopeptide repeat
  Pfam annotation: Domain name=PPR; Domain location=17-50; Score=29.0; E_value=1.6e-05; Accession=PF01535.11; Description=PPR repeat
MPHTHRTFDIMPDRGMDSWHTMIDGYSVNGLGDEALRLFELMKECMAPMVNSEAILRSSIVSSYSLSDYKSYDVWKILKFERLVMKMIIFRMTITDLTGAAH

SEQ ID NO: 79601 - protein, 270 aa, Zea mays
  Coding DNA Sequence Number=SeqID_37822
  Homolog annotation: Hit_ID=Q1S316; Match level="QueryCoverage=32%, HitCoverage=15%, E-value=2e-16, Identity=47%"; Hit description =Pentatricopeptide repeat
  Pfam annotation: Domain name=PPR; Domain location=229-262; Score =29.0; E_value=1.6e-05; Accession=PF01535.11; Description=PPR repeat
MATECFECHSRSGVAWRRMLECAVPPAYQLDHVYRFIKGLFVFHGLKCRWGRVGNFSGRVLENLCTVRLGDGRKGRARAEERARWVEAGVVREARSPWHKGREDARREFRRVLESRPEDWQAVVSAFERIPKWILAVRGALNSRQHQQNMLRALPEIAQKITRLENEDTLLDSSGELLEELRKVHRFFLRSPFCADLRVNNKLLQMYAKCVAMPHTHRTFDIMPDRGMDSWHTMIDGYSVNGLGDEALRLFELMKECMAPMVNSEAILRL

SEQ ID NO: 79602 - protein, 118 aa, Zea mays
  Coding DNA Sequence Number=SeqID_37823
  Homolog annotation: Hit_ID=Q1S316; Match level="QueryCoverage=73%, HitCoverage=15%, E-value=5e-17, Identity=47%"; Hit description =Pentatricopeptide repeat
  Pfam annotation: Domain name=PPR; Domain location=77-110; Score=29.0; E_value=1.6e-05; Accession=PF01535.11; Description=PPR repeat
ALPEIAQKITRLENEDTLLDSSGELLEELRKVHRFFLRSPFCADLRVNNKLLQMYAKCVAMPHTHRTFDIMPDRGMDSWHTMIDGYSVNGLGDEALRLFELMKECMAPMVNSEAILRL

SEQ ID NO: 79603 - protein, 97 aa, Zea mays
  Coding DNA Sequence Number=SeqID_37824
  Homolog annotation: Hit_ID=Q1S316; Match level="QueryCoverage=57%, HitCoverage=9%, E-value=3e-07, Identity=50%"; Hit description =Pentatricopeptide repeat
  Pfam annotation: Domain name=PPR; Domain location=17-50; Score=29.0; E_value=1.6e-05; Accession=PF01535.11; Description=PPR repeat
MPHTHRTFDIMPDRGMDSWHTMIDGYSVNGLGDEALRLFELMKECMAPMVNSEAILRSSIVSSYSLSDYKSYDVWKILKFERLRIFLGCTDSSPNLP

SEQ ID NO: 79604 - protein, 90 aa, Zea mays
  Coding DNA Sequence Number=SeqID_37825
MDTPSGVKGSILACIKFCEGSRSSIVPSYSLSDYKAMMYGKYRNSNGCDVEYLLFWDLVPHGCVWVYRHGNTKKCNVLVTTHLRSGKKVH

SEQ ID NO: 79605 - protein, 100 aa, Zea mays
  Coding DNA Sequence Number=SeqID_37826
MWRIYFFGNSVPHGCVWVYRHGNTEKCNVLVTTHLRSGTLTSKTWSISSYIVTLAQSIDVVRDFLLVTYGLCHSSDAGIKVSGHDPLWNYPDGYLTWTFP

SEQ ID NO: 79606 - protein, 84 aa, Zea mays
  Coding DNA Sequence Number=SeqID_37827
MANPRVMELLQLTRTNYDECSLVMQCHCIETRGGHTNLKKEGKLRKKGRRKTWDYGNTEKCNVLVNDAPTLRYTNLENVCVVDD

SEQ ID NO: 79607 - protein, 108 aa, Zea mays
  Coding DNA Sequence Number=SeqID_37828
  Subcellular localization annotation: CTP_CleavageSite=40; ConfidenceScore=5.42e-01
MAQWLTRSTFAGGRRDSGDRGLASPVKQTSIPRSGSFTEVCSVVSEGRTRMGKAGLACLRRQWLGWPRTRRARANDVPHGCVWVYRHGNTEKCNLLVTTHLRSGKKVH

SEQ ID NO: 79608 - protein, 62 aa, Zea mays
  Coding DNA Sequence Number=SeqID_37829
MARVACTLRGKRLDNGVSVLSVGVNLTWNSVPHGCVWVYRHGNTKKCNVLVTTHLRSGKKVH

SEQ ID NO: 79609 - protein, 180 aa, Zea mays
  Coding DNA Sequence Number=SeqID_37830
MAMMGSTSEKMYLCQFKTTNPQPGVLHTCVLLFLRPFSSEWIDAQVRNSVPHGCVWAYRHGNTEKCNVLVTTHLRSGTLTSKTYHLYWWTFLNWVKSIHVMSTRENNILRHPPLFGNVSRLSLIWIWVTCFFTLKGLSLRISGRDSFKGEGCNTPGVYIPLDNEYGIKHVISVNETDTKI

SEQ ID NO: 79610 - protein, 130 aa, Zea mays
  Coding DNA Sequence Number=SeqID_37831
MAVRGAGRAVFPLLWLSISGCKNLRGRQEAERRTVTRPSPGYIKTEARPVPTFRPDRTQDSKIRSETAVPRTARARATAAPPTTRLVALTPRQDRRRFWQEKQATLRLRRNNRAKKGTGKGGYPEKDPSP

SEQ ID NO: 79611 - protein, 238 aa, Zea mays
  Coding DNA Sequence Number=SeqID_37832
MAVRGAGRAVFPLLWLSISGCKNLRGRQEAERRTVTRPSPGYIKTEARPVPTFRPDRTQDSKIRSETAVPRTARARATAAPPTTRLVALTPRQDRRRFWQEKQATLRLRRNNRAKKGVRRLAPEGFTVASDTERGMTRGDRVRQITRRYFWACLWAPSQPLTNGARMSTQITHLQLTGDTMFGAHQGGSGAALANPAPAKPLTASTYQPENLGPDCTPGLRPVRMREQPDQPKRYARH

SEQ ID NO: 79612 - protein, 79 aa, Zea mays
  Coding DNA Sequence Number=SeqID_37833
MASGSPAPWTVALGAPPWADLGINWVYAHGAHGAPGCFASIPAGTRCCRGVLRDACFGEAPKPWTHVQPESEFDRLIDL

SEQ ID NO: 79613 - protein, 84 aa, Zea mays
  Coding DNA Sequence Number=SeqID_37834
  Subcellular localization annotation: CTP_CleavageSite=40; ConfidenceScore=5.67e-01
MAGAQAPLLPMAPPPCSFPSASAPLPGPTSASTRYMPMARMEHLGVLPPFPPAGSSLTQPECRHHLHIFPPYITASSEPLPLFP

SEQ ID NO: 79614 - protein, 291 aa, Zea mays
  Coding DNA Sequence Number=SeqID_37835
  Homolog annotation: Hit_ID=Q6CQF2; Match level="QueryCoverage=18%, HitCoverage=62%, E-value=1e-07, Identity=56%"; Hit description =Kluyveromyces lactis strain NRRL Y-1140 chromosome D of strain NRRL Y- 1140 of Kluyveromyces lactis
MKNVAKCDTWCELQNPANHRVFERKLRPKPSGGGHVCLGVTPKDTPNTPPRGEGRGVWPPAPHGEVGRSRGCRRTAPGAARGGRHQVVVLGAASRRAAGHSALRTLRATRACPRTATPEASSATDRAQVLWKGTPGRVRAPSGPDPVAPRGAVNESGCLGMQPKSGGKLRPRLNTGERPIANKVPRGKDEKDFEKRVKECLKLPGGKRMGAGDAHRPYAETAPAGFELEHACRDPKDGELCLSGAKPEETLVEARSDTDDSWSPHEFYRVKPMIRGIGGATPSTYSQTLNR

SEQ ID NO: 79615 - protein, 233 aa, Zea mays
  Coding DNA Sequence Number=SeqID_37836
  Homolog annotation: Hit_ID=Q6CQF2; Match level="QueryCoverage=15%, HitCoverage=45%, E-value=8e-08, Identity=72%"; Hit description =Kluyveromyces lactis strain NRRL Y-1140 chromosome D of strain NRRL Y- 1140 of Kluyveromyces lactis
MKNVAKCDTWCELQNPANHRVFERKLRPKPSGGGHVCLGVTPKDTPNTPPRGEGRGVWPPRAARRGGPKQGLPANRAGRSTWWATSSCCSRCSVPARGRPFGPKDPSSDRACPRTATPEASSATDRAQVLWKGTPGRVRAPSGPDPVAPRGAVNESGCLGMQPKSGGFELEHACRDPKDGELCLSGAKPEETLVEARSDTDDSWSPHEFYRVKPMIRGIGGATPSTYSQTLNR

SEQ ID NO: 79616 - protein, 140 aa, Zea mays
  Coding DNA Sequence Number=SeqID_37837
MQDVAWRALSQYYLLFSGVADGLDLKYNPYRLTGSTGGVIVSPVGEGNPRLSSMVNMVVVLNTELDHALDELGKARSEIAELRAERAERHDQEDGSPAPVGTQHPYRSPPHSRYAYGTPTAEPEHFWSLRSLELEFVINV

SEQ ID NO: 79617 - protein, 203 aa, Zea mays
  Coding DNA Sequence Number=SeqID_37838
MMVTVQAVAQSFRRSRSRKDGRGLYPDQWEATCLVCRLDDDIQGAEAYSEHCSITERDTAEAAMQDVAWRALSQYYLLFSGVADGLDLKYNPYRLTGSTGGVIVSPVGEGNPRLSSMVNMVVVLNTELDHALDELGKARSEIAELRAERAERHDQEDGSPAPVGTQHPYRSPPHSRYAYGTPTAEPEHFWSLRSLELEFVINV

SEQ ID NO: 79618 - protein, 731 aa, Zea mays
  Coding DNA Sequence Number=SeqID_37839
  Homolog annotation: Hit_ID=Q1T4D7; Match level="QueryCoverage=23%, HitCoverage=89%, E-value=1e-34, Identity=37%"; Hit description =Polyadenylate binding protein, human types 1, 2, 3, 4
  Pfam annotation: Domain name=RRM_1; Domain location=583-653; Score =93.5; E_value=6.5e-25; Accession=PF00076.12; Description=RNA recognition motif. (a.k.a. RRM, RBD, or
MTLDVKLILDEFNRRVRVPELQGVGVRVPHLPCRPCSLARGGNGCDAVNAGGFVRFDPPSPLDPYDDIAAAQALFSEFNAVPADALALFARHEDDRATISNNSFSRSATTSSASSMTSPTSAPPQDGVPVLSIFTAAVDPKHNVTPDTDVSSSKPLMSSSSASATVATSKLASPLIWTGITLDLDWSHPSSMTPTPSQKVVLTLDLDRRHSMQKGACNLLDESITGGGEIELDATTILDVLPGAHTVGKARCASYADRLYASASCTTPDQALNGHYTDKLLMLCSSNITNTMPTRCSTLVPTPTPMPEIVDGTHPQCQAPPSVSAAARKTPDDLELGLLDYYGAGCRHSLTSRVVTLSYHVPELLLSSNSLEAKALLEAALMEANKERKKNITGTLTTKPNDDDDLDKDDDKLCLRGICLELACTMEVQDCGHQMYVAFMLALCFNISMPITIAPSAMLKMAQPDGELLVSVGVPGNALVLKISIQGVVAAFHRETLQSTSLNEEQMKKDSVTDNCHRQLNKILADLDQDHIIVRSSCLDLDSSGESRDYGFVQFEMDESAQSAIDKLYGLENAWNSIKFSNVYVKNLSDTVTDDELKEMFEKYGTITSDVVMRDNVGNSRCFGFVIFENADAAAQAVQELNGKIFNDKELYVGRVQQPMMPGNLYAKRCDEIFQLAASFLGFKIKNQRSILHLQWDPGGIDVMYQLEGKPNFKKGRMLGTVGPNSPCQPK

SEQ ID NO: 79619 - protein, 749 aa, Zea mays
  Coding DNA Sequence Number=SeqID_37840
  Homolog annotation: Hit_ID=Q1T4D7; Match level="QueryCoverage=14%, HitCoverage=33%, E-value=2e-16, Identity=42%"; Hit description =Polyadenylate binding protein, human types 1, 2, 3, 4
  Pfam annotation: Domain name=RRM_1; Domain location=583-651; Score =10.6; E_value=0.015; Accession=PF00076.12; Description=RNA recognition motif. (a.k.a. RRM, RBD, or
MTLDVKLILDEFNRRVRVPELQGVGVRVPHLPCRPCSLARGGNGCDAVNAGGFVRFDPPSPLDPYDDIAAAQALFSEFNAVPADALALFARHEDDRATISNNSFSRSATTSSASSMTSPTSAPPQDGVPVLSIFTAAVDPKHNVTPDTDVSSSKPLMSSSSASATVATSKLASPLIWTGITLDLDWSHPSSMTPTPSQKVVLTLDLDRRHSMQKGACNLLDESITGGGEIELDATTILDVLPGAHTVGKARCASYADRLYASASCTTPDQALNGHYTDKLLMLCSSNITNTMPTRCSTLVPTPTPMPEIVDGTHPQCQAPPSVSAAARKTPDDLELGLLDYYGAGCRHSLTSRVVTLSYHVPELLLSSNSLEAKALLEAALMEANKERKKNITGTLTTKPNDDDDLDKDDDKLCLRGICLELACTMEVQDCGHQMYVAFMLALCFNISMPITIAPSAMLKMAQPDGELLVSVGVPGNALVLKISIQGVVAAFHRETLQSTSLNEEQMKKDSVTDNCHRQLNKILADLDQDHIIVRSSCLDLDSSGESRDYGFVQFEMDESAQSAIDKLYGLENAWNSIKFSNVYVKNLSDTVTDDELKEMFEKYGTITISLLFFGDKVFNLEEISAMLFGKMKDTAEAYLGKKINDAIVFVPAYFNNAQRQTTKDTAITEVDILRDAATIICHDQERCDEIFQLAASFLGFKIKNQRSILHLQWDPGGIDVMYQLEGKPNFKKGRMLGTVGPNSPCQPK

SEQ ID NO: 79620 - protein, 126 aa, Zea mays
  Coding DNA Sequence Number=SeqID_37841
MDIEVEEGNVDVGNTAEPSYEVVASSGCSAHVPTNDTDEHKLDIESEDSKVLSAYIHCIRDEEHLLHREGGKVFLENTFISSLLKRDGDPKDDITMFRFKLSVILWDSRLNTKKIHQNLDHNVDED

SEQ ID NO: 79621 - protein, 255 aa, Zea mays
  Coding DNA Sequence Number=SeqID_37842
MDIEVEEGNVDVGNTAEPSYEVVASGGCSAQLSTNDTDEHELDIESEDSKVSVGNAAKQSHDVVGVGIDCIFNPIKVSTEADLGPQPDVIHLTSLDVPNETSQISFDVNMVEQNKQDALDTLIRISQHKKPKKLNVARVVSEDYKCTPEDVQLIEYIKTLLGKQVVVNIDNAWLNKNDMECLFHGDIQLSGEVLSAYIHYMRDEEHLLQREGGKVFLENIFISSPLKHDGDPKVFIPMMSGTIIRGTLKTPNLSW

SEQ ID NO: 79622 - protein, 61 aa, Zea mays
  Coding DNA Sequence Number=SeqID_37843
  Homolog annotation: Hit_ID=P93231; Match level="QueryCoverage=56%, HitCoverage=3%, E-value=1e-09, Identity=82%"; Hit description =Vacuolar protein sorting-associated protein 41 homolog
MLSLSPYFVDEPYTSYEPPPLVGSRYLDHSIIERKYAEVAQRCPKLLRGSPSAWERLPLLL

SEQ ID NO: 79623 - protein, 61 aa, Zea mays
  Coding DNA Sequence Number=SeqID_37844
  Homolog annotation: Hit_ID=Q6JJ36; Match level="QueryCoverage=64%, HitCoverage=4%, E-value=6e-10, Identity=77%"; Hit description =Putative vacuolar assembling protein
MLSLSPYFVDQPYTSYELPPLVGSRYLDHSIIERKYAEVAQRCPKLLRGSPSAWERLPLLL

SEQ ID NO: 79624 - protein, 230 aa, Zea mays
  Coding DNA Sequence Number=SeqID_37845
  Subcellular localization annotation: CTP_CleavageSite=13; ConfidenceScore=5.25e-01
MAATTDRLRPCLAASTGGNGESSVARRGSTRHGKAVGISGVHSHMWTTNSTTGAQRPTLGGGRAWRGAFTFGRLDIRKKGNSTVGRKEKGENSHGAGHLREWFERELASGCRAPYDVADLSGTGGYREEDGGWASSGSPKRGTRSLGGLADGSGAHEMVLRVNIGEGVTDLTLLIGISPPRFKKELARKREKLEDANRTGARGKGMDRKGKTTLRPSKGKGNTKTCRIGA

SEQ ID NO: 79625 - protein, 81 aa, Zea mays
  Coding DNA Sequence Number=SeqID_37846
MGAGPRSGGVAGYTRWAERKGWVAGEMEMGHERRPAGGEGSEKLEDANRTGARGKGMDRKGKTTLRPSKGKGNTKTCRIGA

SEQ ID NO: 79626 - protein, 240 aa, Zea mays
  Coding DNA Sequence Number=SeqID_37847
  Subcellular localization annotation: CTP_CleavageSite=51; ConfidenceScore=5.51e-01
GYTGSDRDRKPAILRLQTSHGKNQSRPSKTHQTVRTLLLSHANSRAPKNTRTAAKRRCAPSGYPTIPHLCINPNATSVTQRGRYDGHDGGALTSFHGDNRSGHDALRSTEELHDHRAIPSTTAGQSSINLTHNSAKTWARMAESARAEIFGTAGTAFRHAKITGGFPAERAVEVVEGRKDRADGVRALGWDESDLRVPPGGHHAEADGEVVTQAGTREPASARKTAISVSPERADRDELT

SEQ ID NO: 79627 - protein, 100 aa, Zea mays
  Coding DNA Sequence Number=SeqID_37848
MAESARAEIFGTAGTAFRHAKITGGFPAERAVEVVEGRKDRADGVRALGWDESDLRVPPGGHHAEADGEVVTQAGTREPASARKTAISVSPERADRDELT

SEQ ID NO: 79628 - protein, 263 aa, Zea mays
  Coding DNA Sequence Number=SeqID_37849
MGRIARGPLSWTRPHCGMPSSPRLSSGDFERRVAFLPSLQQIDPDHHWMRFRFEREDVTITASQIRQLFGFPESTTRLHSLCYDTSDPPRRPHGGVAPGTAHVASLFRPPFTDGSRRSPADFTTAAKYLYELIRRTLLLRMGYREATTHIQLWLLGALVSHSEFDVVDFLICEIEDTVLDGIRARRQLPYAHYLCHIFAQLIQPPQFQGTLEASRLVFGFYRPAPEIPVPASAPVFDSQAEDAALHQFDTQATTVDDDDDDFG

SEQ ID NO: 79629 - protein, 485 aa, Zea mays
  Coding DNA Sequence Number=SeqID_37850
MGRIARGPLSWTRPHCGMPSSPRLSSGDFERRVAFLPSLQQIDPDHHWMRFRFEREDVTITASQIRQLFGFPESTTRLHSLCYDTSDPPRRPHGGVAPGTAHVASLFRPPFTDGSRRSPADFTTAAKYLYELIRRTLLLRMGYREATTHIQLWLLGALVSHSEFDVVDFLICEIEDTVLDGIRARRQLPYAHYLCHIFAQLIQPPQFQGTLEASRLVFGFYRPAPEIPVPASAPVFDSQAEDAALHQFDTQATTVDDDDDDFGVPPSPPMPPRSHDHEAGSSSAAPATPQAMDPALASILQSITQQQAHLAAEQARLSERMLSMFQNMQDRQDALQQQLLQDRAESRAFMALMLQQSGVSVPPVQSAPPPPLHAPVVPSILSGPPVGTSPLRPVTLAFTSPVLSSVCPQSPVPPASAITTTDVAVSVTTSVPAAPAARPLSESVPAPASIVDPGSETDSDPPPAFALLPRLRPDAPPPPPPASDV

SEQ ID NO: 79630 - protein, 154 aa, Zea mays
  Coding DNA Sequence Number=SeqID_37851
MGKGTKRKREPTPPSDEFGDSEYSEEEFSSESEGSPAPIPLRESSDDSDDSQGLAAEVWTYIRAVERSGLEGSDESEFSSDEEDSDGGEEEDDDDDGDDDDGGDGDGDGGNGGGGSGGKGSTRGGSSTGSTRGGGDKGSTKSGGGKGSGGKASG

SEQ ID NO: 79631 - protein, 154 aa, Zea mays
  Coding DNA Sequence Number=SeqID_37852
MGKGTKRKREPTPPSDEFGDSEYSEEEFSSESEGSPAPIPLRESSDDSDDSQGLAAEVWTYIRAVERSGLEGSDESEFSSDEEDSDGGEEEDDDDDGDDDDGGDGDGDGGNGGGGSGGKGSTRGGSSTGSIRGGGDKGSTKGGGGKGSGGKASG

SEQ ID NO: 79632 - protein, 153 aa, Zea mays
  Coding DNA Sequence Number=SeqID_37853
  Subcellular localization annotation: CTP_CleavageSite=53; ConfidenceScore=5.43e-01
MARVPSVPSLDPFLGERARPLAAAPRVRCATSPLRPTCTAPANPLPRARQGTVSMAGEPSREPRSKSRCIREGNCLVGPTPNAYPYVISLKWLKTANAIHLQASRDRRSSVGDHVIKLSEFYEAEDPEHLFGEGKCPLTHYVLSIYNSLFRTT

SEQ ID NO: 79633 - protein, 72 aa, Zea mays
  Coding DNA Sequence Number=SeqID_37854
  Subcellular localization annotation: CTP_CleavageSite=28; ConfidenceScore=5.11e-01
MARVPSVPSLDPFLGERARPLAAAPRVRCATSPLRPACTASAWSLAGELGRWPATAVRQAAIPLHDSFFLSC

SEQ ID NO: 79634 - protein, 161 aa, Zea mays
  Coding DNA Sequence Number=SeqID_37855
  Subcellular localization annotation: CTP_CleavageSite=89; ConfidenceScore=5.32e-01
MCRLSIYCDLSTQLAGSVQAILQAACLSNHLPNSTPVLQGALCPSSLMSCQRSFPCTPILRRSRMSGCKKIAPATPSIASIIFLGPHVEAQHRSYSCAGIPDSIEGGSGGIVRSKGVATSPSKLHGLTRGHEAVAGRRRPTARHGTFYLDQIEATVFPAPT

SEQ ID NO: 79635 - protein, 50 aa, Zea mays
  Coding DNA Sequence Number=SeqID_37856
MNSGTREDLEWFGSPEDGLDAACQLSGQVTINAEAAHRLSGWTCGASSPQ

SEQ ID NO: 79636 - protein, 97 aa, Zea mays
  Coding DNA Sequence Number=SeqID_37857
  Gene Ontology: Mol. function=metal ion binding; Cellular component =integral to membrane
  Homolog annotation: Hit_ID=Q6KAE5; Match level="QueryCoverage=90%, HitCoverage=18%, E-value=4e-22, Identity=59%"; Hit description =Putative receptor-like kinase Xa21-binding protein 3
  Pfam annotation: Domain name=Ank; Domain location=32-64; Score=15.4; E_value=0.19; Accession=PF00023.20; Description=Ankyrin repeat
  Pfam annotation: Domain name=Ank; Domain location=65-97; Score=23.1; E_value=0.001; Accession=PF00023.20; Description=Ankyrin repeat
  Pfam module annotation: Pfam domain module=Ank::Ank; Domain location =32-64::65-97
MIRGCLTEGKLARAIELYEMMGSKGCPPDVHTYSILMHYATAQGHHEIVSLLLESRVEINLRNYRRQTALMQACQYGHWEVVQKLILFNANIMFQAY

SEQ ID NO: 79637 - protein, 639 aa, Zea mays
  Coding DNA Sequence Number=SeqID_37858
  Gene Ontology: Mol. function=helicase activity; Cellular component =mitochondrion; Biological process=protein amino acid phosphorylation
  Homolog annotation: Hit_ID=Q8S5M5; Match level="QueryCoverage=78%, HitCoverage=61%, E-value=0.0, Identity=42%"; Hit description =Putative PPR-repeat protein
  Pfam annotation: Domain name=DUF1955; Domain location=446-574; Score=- 62.8; E_value=0.048; Accession=PF09205.1; Description=Domain of unknown function (DUF1955)
  Pfam annotation: Domain name=PPR; Domain location=143-177; Score =22.0; E_value=0.0022; Accession=PF01535.11; Description=PPR repeat
  Pfam annotation: Domain name=PPR; Domain location=204-238; Score =27.4; E_value=4.9e-05; Accession=PF01535.11; Description=PPR repeat
  Pfam annotation: Domain name=PPR; Domain location=270-304; Score =34.2; E_value=4.6e-07; Accession=PF01535.11; Description=PPR repeat
  Pfam annotation: Domain name=PPR; Domain location=305-339; Score =48.3; E_value=2.6e-11; Accession=PF01535.11; Description=PPR repeat
  Pfam annotation: Domain name=PPR; Domain location=340-374; Score =46.9; E_value=7e-11; Accession=PF01535.11; Description=PPR repeat
  Pfam annotation: Domain name=PPR; Domain location=375-409; Score =35.4; E_value=2e-07; Accession=PF01535.11; Description=PPR repeat
  Pfam annotation: Domain name=PPR; Domain location=410-444; Score =32.6; E_value=1.4e-06; Accession=PF01535.11; Description=PPR repeat
  Pfam annotation: Domain name=PPR; Domain location=445-479; Score =40.0; E_value=8.1e-09; Accession=PF01535.11; Description=PPR repeat
  Pfam annotation: Domain name=PPR; Domain location=480-514; Score =47.5; E_value=4.6e-11; Accession=PF01535.11; Description=PPR repeat
  Pfam annotation: Domain name=PPR; Domain location=515-549; Score =41.3; E_value=3.2e-09; Accession=PF01535.11; Description=PPR repeat
  Pfam annotation: Domain name=PPR; Domain location=550-584; Score =41.8; E_value=2.3e-09; Accession=PF01535.11; Description=PPR repeat
  Pfam annotation: Domain name=PPR; Domain location=585-619; Score =36.2; E_value=1.1e-07; Accession=PF01535.11; Description=PPR repeat
  Pfam module annotation: Pfam domain module=DUF1955::PPR::PPR::PPR::PPR ::PPR::PPR::PPR::PPR::PPR::PPR::PPR::PPR; Domain location=446 -574::143-177::204-238::270-304::305-339::340-374::375-409::410
  Pfam module annotation: Domain location=515-549::550-584::585-619
  Subcellular localization annotation: CTP_CleavageSite=34; ConfidenceScore=5.14e-01
MDEPPCPPPRPALNSAAATSWPELLAPFDLSRLRATLSSHPLTPRRLARLLALPLAPATSLLLLDWYASSHPALSLSSLPLRPILAAADPDRALALLDSLPASRLPPLRESLLLPLLRSLPPGRALHLLDQMPRRFAVSPSFRSYNVVLSTLARADCHADALLLYRRMLRDRVPPHHLHLRAGSPRPAMLLDEMLLMGCAADVNTFNDLVLGLCGLGRVREAARLVDRMMTQGCMPSVVTYGFLLQGLCRTRQADEACAMLGRLPEVNVVMLNTVIRGCLTEGKLARATELYEMMGSKGCPPDVHTYSILMHGLCKLGRFGSAVRMLDEMEEKGCAPNIVTYSTLLHSFCRNGMWDDARAMLDQMLAKGFSMNSQGYNGIIYALCKDGKLDQATRLVQEMKSQGCKPDICTYNTMIYHLCNNDLMEEAEHIFRNLIEEGVVANGITYNTLIHALLRNGRWQEGLRLASEMLLHGCQLDVISYNGLIKALCKEGNVDRSMALLEEMVTKGIKPNNFSYNMLINELCKAGKVRDALELSKEMLNQGLTPDIVTYNTLINGLCKVGWTHAALNLLEKLPNENVHPDIVTYNILISWHCKVRLLDDAAMLLDKAISGGIVPNERTWGMMVQNFVRQTVNLEGY

SEQ ID NO: 79638 - protein, 160 aa, Zea mays
  Coding DNA Sequence Number=SeqID_37859
  Gene Ontology: Cellular component=endoplasmic reticulum
  Homolog annotation: Hit_ID=Q8S2K0; Match level="QueryCoverage=50%, HitCoverage=32%, E-value=2e-28, Identity=77%"; Hit description =Putative 24 kDa seed maturation protein
  Pfam annotation: Domain name=Reticulon; Domain location=12-157; Score= -21.8; E_value=2.6e-05; Accession=PF02453.8; Description=Reticulon
MDRALEFSLDLSLDSFTDNSVAAPRSNRLLLGGISITSHKLKEKLGTYWSTRGSRLHVDYHNSWTMTYFPWLFRCPNIPEVKIPNDLALNVARSLRYEINMGFATLWVIGQDHQLKKYLIVVAGLWILSVHGSCCNFLTLSYIVFVVLYTVPVLYEVTLR

SEQ ID NO: 79639 - protein, 83 aa, Zea mays
  Coding DNA Sequence Number=SeqID_37860
  Subcellular localization annotation: CTP_CleavageSite=73; ConfidenceScore=5.15e-01
MKYRLAKYVPDSHAEGFKDGKKVQGLCTFMSPFSFKIKLNLSCQLSFAAQNNSVFSLIINTFSQDCGSFLSMGAAAIFSPCLT

SEQ ID NO: 79640 - protein, 142 aa, Zea mays
  Coding DNA Sequence Number=SeqID_37861
  Homolog annotation: Hit_ID=Q6QP51; Match level="QueryCoverage=36%, HitCoverage=25%, E-value=3e-09, Identity=56%"; Hit description =Putative growth-regulating factor 1
  Subcellular localization annotation: CTP_CleavageSite=24; ConfidenceScore=5.11e-01
MAAQGAGRAVSSSLAKSLGLQKPKREAGSGAKNRHQTLSRVYKDQGETGSNVSPGPDAGFENAKAKQPFPGRLTHAQRGSKAGPPEGFDSRLRSRGPYTHYWSEVRRPAPRKGSTAASGYSGYAPITDQGFEGWPPKGSQPP

SEQ ID NO: 79641 - protein, 152 aa, Zea mays
  Coding DNA Sequence Number=SeqID_37862
MEKGHGSHGEMMVTRSAIIERKGWRRKGQGGRFPLLWLSLSGCENLRGRQEAEQRTVTRPSPGYIKTKARPVQTFRPDRTRDSKTQSETAVPRKARARATAAPRTTRPVALTPRRDRRRLWQEKQATLRLRHNNRAKKGTGKGGYPEKDPSP

SEQ ID NO: 79642 - protein, 64 aa, Zea mays
  Coding DNA Sequence Number=SeqID_37863
MAKKNSSWGLQSFSTAPSGDADGIMAAARVLCCGDAIVDITPQLITLNQRSKSDKYHKNKHSSI

SEQ ID NO: 79643 - protein, 51 aa, Zea mays
  Coding DNA Sequence Number=SeqID_37864
MVKVRLADGKKNLVREDSIQGDVIVDITPQLITLNQRSKSDKYHKNKHSSS

SEQ ID NO: 79644 - protein, 90 aa, Zea mays
  Coding DNA Sequence Number=SeqID_37865
MELGWSRGGGKDAIMAHEIEEFTLYSMYTNLSTTNPTPLKNNLVLEISKQKGYTEVRREMVRVRLADGKKNLVREDSVQGGKFESSRDLI

SEQ ID NO: 79645 - protein, 104 aa, Zea mays
  Coding DNA Sequence Number=SeqID_37866
MADAASADQHRREIGDAPLEHRGVTGVTNPTPLKNNLVLEISKQKGYTEVRREMVRVRLADGKKNLVREDSVQGDVIVDITPQLIALNQRSKSDKYHKNKHSSI

SEQ ID NO: 79646 - protein, 113 aa, Zea mays
  Coding DNA Sequence Number=SeqID_37867
  Subcellular localization annotation: CTP_CleavageSite=35; ConfidenceScore=5.25e-01
LSSNQAANPAAPPRQTMTKLTGNAPNPISSAQTTNCDYLRDADKKAKRTMDNLLPVTARSWFGRRQWRMRLPLINTDVKLVKLHLSTAVRRALRRQIDGSRGQEGGMRKGRSR

SEQ ID NO: 79647 - protein, 298 aa, Zea mays
  Coding DNA Sequence Number=SeqID_37868
  Gene Ontology: Mol. function=zinc ion binding; Cellular component =intracellular
  Homolog annotation: Hit_ID=Q1SNI8; Match level="QueryCoverage=78%, HitCoverage=71%, E-value=4e-59, Identity=49%"; Hit description=Zinc finger, RanBP2-type
  Pfam annotation: Domain name=zf-RanBP; Domain location=178-206; Score= 32.2; E_value=1.8e-06; Accession=PF00641.9; Description=Zn-finger in Ran binding protein and others
  Pfam annotation: Domain name=zf-RanBP; Domain location=25-54; Score =35.3; E_value=2.1e-07; Accession=PF00641.9; Description=Zn-finger in Ran binding protein and others
  Pfam module annotation: Pfam domain module=zf-RanBP::zf-RanBP; Domain location=178-206::25-54
MSGGGGGAGAGSSSGGGGGGGGGGREGDWDCGSCGNRNYAFRSLCNRCKQPRLLVDPNTPRDSKWLPRAGDWICTEKIKNCKKCGLSKEEAAMPALQMAGMAMPAYATYIARLQSLAASASAYKMNFGMAANSPLQQQLLANANWSYGMAGRYGMQSSGWPLGNSSPNQFPGVPKDWRNGDWLCSCGFHNYSSRTQCKECGAPIPSGIPSTTMKATTSDASSTLGTKRLASEELANDCDNKRLNPGNDNYPLSTAGANNLFLGIEQGAGSSNGQAAFSKFDYGSSMSLPSGQGMSGLI

SEQ ID NO: 79648 - protein, 181 aa, Zea mays
  Coding DNA Sequence Number=SeqID_37869
  Subcellular localization annotation: CTP_CleavageSite=18; ConfidenceScore=5.18e-01
MKLWKETSRSSKTTTSSRCGLAATPSRLPVKAAVIYVSFPHFDLLSRIFSLTLTGKGKEREDASHAGRRATSGTTMQIWPNPQRGGAKTSVKTWDDSSSEDEPPRPRSHRSSSRSSWSSHKCLMARENFETFANFNYELTTKFEQLESNGPSSATDDILMKKNEKLKAKLASSQPGSVKMI

SEQ ID NO: 79649 - protein, 286 aa, Zea mays
  Coding DNA Sequence Number=SeqID_37870
  Subcellular localization annotation: CTP_CleavageSite=18; ConfidenceScore=5.19e-01
MKLWKETSRSSKTTTSSRCGLAATPSRLPVKAAVIYVSFPHFDLLSRIFSLTLTGKGKEREDASHAGRRATSGTTMQIWPNPQRGGAKTSVKTWDDSSSEDEPPRPHSHRSSSRSSWSSHKCLMARENFETFANFNYELTTKFEQLESNGPSSATDDILMKKNEKLKAKLASSQEAIENLLEKMEILSIHNNELTTKLENIGSTSEVSLVEISKIIKKDASTSCFDIIHDSNPCNQVLVENVVIETCSNEVAKENEQLRQEVARLGKALYDKKGKAKHNVLRITPL

SEQ ID NO: 79650 - protein, 269 aa, Zea mays
  Coding DNA Sequence Number=SeqID_37871
  Homolog annotation: Hit_ID=Q9LLI9; Match level="QueryCoverage=17%, HitCoverage=4%, E-value=8e-21, Identity=91%"; Hit description =Cellulose synthase-1
  Subcellular localization annotation: CTP_CleavageSite=40; ConfidenceScore=5.41e-01
MANRPPARPTANTPQSRPTHVARPPSVTRGTLQPPPNQPKARPEGHERHRLDPARSSPDLLAIVAAMPGFALYSPRSDRDFDFPTDAGAVGLTDRDPSSHGRLLVWFADQNGDVMLLLRRVSHQIRHVLLAISELFVLGPILRTVSKSTIGVSATGDVFVACNECAFPICRPCYEYEREGNQCCPQCKTRYKRQKYWFPGNFFEWDYKDKHGVKGLCVVGAINNCTSQLPHLWEIFSPIIYASENIIASCHWAYKGVEEDSTLEDPYFL

SEQ ID NO: 79651 - protein, 184 aa, Zea mays
  Coding DNA Sequence Number=SeqID_37872
  Gene Ontology: Mol. function=phosphotransferase activity, phosphate group as acceptor; Cellular component=chloroplast; Biological process=nucleobase, nucleoside, nucleotide and nucleic acid metabolic process
  Homolog annotation: Hit_ID=Q84JF7; Match level="QueryCoverage=98%, HitCoverage=65%, E-value=1e-49, Identity=56%"; Hit description =Putative adenylate kinase
  Pfam annotation: Domain name=ADK; Domain location=2-150; Score=25.8; E_value=9e-10; Accession=PF00406.12; Description=Adenylate kinase
FAEVVSHGKLLAEIVNHGKLVSDEIIINLLSRRLEEGEEKGELGFILDGFPRTIGQAEILEGVTDIDLVINLKLREEALLAKCLGRRMCSQCGGNFNVASIDIEGEDGGPRMYMPPLLPPPQCESKLIARADDTEEVTEPVEEFYRARGKLLEFNLPGGIPESWPKLLQALNIEDPDNKRSAAA

SEQ ID NO: 79652 - protein, 209 aa, Zea mays
  Coding DNA Sequence Number=SeqID_37873
  Gene Ontology: Mol. function=phosphotransferase activity, phosphate group as acceptor; Cellular component=chloroplast; Biological process=nucleobase, nucleoside, nucleotide and nucleic acid metabolic process
  Homolog annotation: Hit_ID=Q84JF7; Match level="QueryCoverage=86%, HitCoverage=65%, E-value=2e-49, Identity=56%"; Hit description =Putative adenylate kinase
  Pfam annotation: Domain name=ADK; Domain location=15-175; Score=32.6; E_value=2.9e-10; Accession=PF00406.12; Description=Adenylate kinase
KFLTKREGRKEAPTAALLFRNLSEQFAEVVSHGKLLAEIVNHGKLVSDEIIINLLSRRLEEGEEKGELGFILDGFPRTIGQAEILEGVTDIDLVINLKLREEALLAKCLGRRMCSQCGGNFNVASIDIEGEDGGPRMYMPPLLPPPQCESKLIARADDTEEVTEPVEEFYRARGKLLEFNLPGGIPESWPKLLQALNIEDPDNKRSAAA

SEQ ID NO: 79653 - protein, 124 aa, Zea mays
  Coding DNA Sequence Number=SeqID_37874
MEDLGLGLIFSCLLEGFMGCNTFVWETICPGRGLTSFDATKLCVALEDIACMLEQGSLVFQEYLDKVNNDNNHIDDDYVSSELSSPPPTKAHLGEDLDFAEHFKNMWGVEYDSDQMPSFSGNEL

SEQ ID NO: 79654 - protein, 126 aa, Zea mays
  Coding DNA Sequence Number=SeqID_37875
MSVAKAFSDGTCSDHPYGSLKVFSDQPETICPGRGLTSFDATKLCVALEDIACMLEQGSLVFQEYLDKVNNDNNHIDDDYVSSELSSPPPTKAHLGEDLDFAEHFKNMWGVEYDSDQMPSFSGNEL

SEQ ID NO: 79655 - protein, 327 aa, Zea mays
  Coding DNA Sequence Number=SeqID_37876
  Gene Ontology: Mol. function=transferase activity; Biological process= paclitaxel biosynthetic process
  Homolog annotation: Hit_ID=Q9FTG9; Match level="QueryCoverage=89%, HitCoverage=71%, E-value=1e-141, Identity=82%"; Hit description =Taxadienol acetyl transferase-like
  Pfam annotation: Domain name=Transferase; Domain location=1-326; Score=-3.3; E_value=8.5e-11; Accession=PF02458.6; Description =Transferase family
MSRQLAERRKKAEEEYLSHFTVDRHQKIIHQGEIDMESLLPPPQAPIVTKFTCGGFSVGICFSHLVFDGQGAAQFLKAVGEMARGLPEPSIKPIWARDAIPNPPKPPLGPPPSFTAFNFEKSVVEIALDSIKRVKDQVASETNQKCSTFDVVTAMIFKCRALAVDFAPDAEVRLGFAASTRHLLSNVLPSVDGYYGNCVYPGGLTKTSQEVKEASLVEIVTAIREAKEALSSRFLDWLSGGAKENHYNVSLDYGTLVVTDWSHVGFNDVDYGFGEPSYVFTLNDDVNIVPSVVYLKPPKPKQGIRLVLQCVEGRHSAVFSEELQKHA

SEQ ID NO: 79656 - protein, 330 aa, Zea mays
  Coding DNA Sequence Number=SeqID_37877
  Gene Ontology: Mol. function=transferase activity; Biological process= paclitaxel biosynthetic process
  Homolog annotation: Hit_ID=Q9FTG9; Match level="QueryCoverage=84%, HitCoverage=66%, E-value=1e-140, Identity=87%"; Hit description =Taxadienol acetyl transferase-like
  Pfam annotation: Domain name=Transferase; Domain location=3-329; Score=-5.7; E_value=1.1e-10; Accession=PF02458.6; Description =Transferase family
  Subcellular localization annotation: CTP_CleavageSite=26; ConfidenceScore=5.27e-01
MAQRVFFSMKNPRTRPRRRRVDLVVCGSSRKVGAARSLCLSLATMTLDVSVTKFTCGGFSVGICFSHLVFDGQGAAQFLKAVGEMARGLPEPSIKPIWARDAIPNPPKPPLGPPPSFTAFNFEKSVVEIALDSIKRVKDQVASETNQKCSTFDVVTAMIFKCRALAVDFAPDAEVRLGFAASTRHLLSNVLPSVDGYYGNCVYPGGLTKTSQEVKEASLVEIVTAIREAKEALSSRFLDWLSGGAKENHYNVSLDYGTLVVTDWSHVGFNDVDYGFGEPSYVFTLNDDVNIVPSVVYLKPPKPKQGIRLVLQCVEGRHSAVFSEELQKHA

SEQ ID NO: 79657 - protein, 64 aa, Zea mays
  Coding DNA Sequence Number=SeqID_37878
MSDDLVVPVHFEVGQELCFRLLDHPLLVLLELELLVSRQAPNTQEELAAVLSGQAQTVRGLGPD

SEQ ID NO: 79658 - protein, 88 aa, Zea mays
  Coding DNA Sequence Number=SeqID_37879
MSDDLVVPVHFEVGQELCFHLLDHPLLVLLELELLVSRQAPNTQEELAAVLSGQARTVRGLGPDGAAEDRRRRLDLAPGRYPVGEERS

SEQ ID NO: 79659 - protein, 121 aa, Zea mays
  Coding DNA Sequence Number=SeqID_37880
MRLTDAGDGQMKTLHLDDGLRVCFKWITIRAIACRLILLICASDQSIIHCCRLLLLQCIVAWPQVHPNESLYEKKPEEPTLVLTSLVIEILQPGANPILTNLNMSKMHLLLRLGTAQKENR

SEQ ID NO: 79660 - protein, 281 aa, Zea mays
  Coding DNA Sequence Number=SeqID_37881
  Gene Ontology: Mol. function=transferase activity, transferring glycosyl groups; Biological process=sucrose metabolic process
  Homolog annotation: Hit_ID=Q8L5H0; Match level="QueryCoverage=92%, HitCoverage=36%, E-value=1e-120, Identity=83%"; Hit description =Sucrose synthase 3
MRLTDAGDGQMKTLHLDDGLRVCFKWITIRAIAWMLLVKLLLNYKCNIAHALEKTKYPDSDIFWKNFDEKYHFSCQFTTDIIAMNNADFIITSTYQEIAGSKNIVGQYESHIAFTPELSHGIDVFDPKFNIVSPGADMSIYFPHTRRPSDSPLHGSIENLIYDPEQNDEHIGHLDDRSKPILFSMARLDRVKDITGLVEAFAKCAKLRELANLVVVAGYNDVKKSKDREEIAEIEKMHELIKTHKLFRQFRWISAQTNRARNGELYRYIVDTHGAFVQIYS

SEQ ID NO: 79661 - protein, 73 aa, Zea mays
  Coding DNA Sequence Number=SeqID_37882
MAAAGVSGALYAKAVRPGRELGIDGDGCHVWGRSTLTCRTIQEMVDGVTWPTTLPPGWTVEWDVAPAGEEHEE

SEQ ID NO: 79662 - protein, 81 aa, Zea mays
  Coding DNA Sequence Number=SeqID_37883
MVGTSAVCTAAAGVSGALYAKAVRPGRGRGIDGDGCHVWGRSTLTCRTIQEMVDGVTWPTTLPPGWTVEWDVAPAGEEHEE

SEQ ID NO: 79663 - protein, 93 aa, Zea mays
  Coding DNA Sequence Number=SeqID_37884
MRPETGVSHASYGGYKCGHCTAAAGVSGALYAKAVRPGRERGIDGDGCHVWGRSTLTCRTIQEMVDGVTWPTTLPPGWTVEWDVAPAGEEHEE

SEQ ID NO: 79664 - protein, 122 aa, Zea mays
  Coding DNA Sequence Number=SeqID_37885
MGEYVLIPEQGSVQEEDQEQASEAAIEDLPAAPAIEGKPRYGGYKCGHCTAAAGVSGALYAKAVRPGRERGIDGDGCHVWGRSTLTCRTIQEMVDGVTWPTTLPPGWTVEWDVAPAGEEHEE

SEQ ID NO: 79665 - protein, 144 aa, Zea mays
  Coding DNA Sequence Number=SeqID_37886
MAGGNTLAGAKERWLAGEDCNLADGEYVFIPEQGSAQQEDQEQASEAAIEDLPAAPAIEGKPRYGGYKCGHCTAAAGVSGALYAKAVRPGRERGIDGDGCHVWGRSTLTCRTIQEMVDGVTWPTTLPPGWTVEWDVAPAGEEHE

SEQ ID NO: 79666 - protein, 230 aa, Zea mays
  Coding DNA Sequence Number=SeqID_37887
  Gene Ontology: Mol. function=binding; Cellular component =mitochondrial inner membrane; Biological process=transport
  Homolog annotation: Hit_ID=Q66PW8; Match level="QueryCoverage=91%, HitCoverage=94%, E-value=1e-39, Identity=56%"; Hit description =Mitochondrial 2-oxoglutarate/malate translocator
  Pfam annotation: Domain name=Mito_carr; Domain location=135-229; Score=78.4; E_value=2.2e-20; Accession=PF00153.17; Description =Mitochondrial carrier protein
  Pfam annotation: Domain name=Mito_carr; Domain location=23-133; Score= 50.9; E_value=4.4e-12; Accession=PF00153.17; Description =Mitochondrial carrier protein
  Pfam module annotation: Pfam domain module=Mito_carr::Mito_carr; Domain location=135-229::23-133
  Subcellular localization annotation: CTP_CleavageSite=12; ConfidenceScore=5.25e-01
MADAKQQQQQPQQAAAAATGVWKTVKPFVNGGASGMLATCVIQPIDMVKVPYHRTALSPGFLHSARGFAPSSKKVRIQLGEGSAGQVTRNMLANEGVRSFYKGLSAGLLRQATYTTARLGSFSHVRPAVSFLMQSFNLIAGASAVSGFFASACSLPFDYVKTQIQKMQPDANGKYPYTGSLDCAVKTFKSGGPFKFYTGFPVYCVRIAPHVMMTWIFLNQIQKFEKKIGI

SEQ ID NO: 79667 - protein, 216 aa, Zea mays
  Coding DNA Sequence Number=SeqID_37888
  Homolog annotation: Hit_ID=Q66PW8; Match level="QueryCoverage=37%, HitCoverage=26%, E-value=6e-43, Identity=98%"; Hit description =Mitochondrial 2-oxoglutarate/malate translocator
  Pfam annotation: Domain name=Mito_carr; Domain location=1-88; Score =70.7; E_value=4.6e-18; Accession=PF00153.17; Description =Mitochondrial carrier protein
ASAVSGFFASACSLPFDYVKTQIQKMQPDANGKYPYTGSLDCAVKTFKSGGPFKFYTGFPVYCVRIAPHVMMTWIFLNQIQKRPHHHTRLPSPVAPIASPLEIPAAARRKDPTASVALFVVFLIEANRPGCCGAASRPVRLRALVEVGDHAEAAVVALDEGVDGLPHQRCASTEGFFVGTSSRKGIPSALRAPLGSYHDRAEASGERDTGPRLQAA

SEQ ID NO: 79668 - protein, 63 aa, Zea mays
  Coding DNA Sequence Number=SeqID_37889
MEVQHSLSRPLSGKGLCEHTGSPRRGFPIAVAAFVLVLALATPCLYVVVVLCRLPSRLALLRN

SEQ ID NO: 79669 - protein, 63 aa, Zea mays
  Coding DNA Sequence Number=SeqID_37890
MEVQHSLSRPLSGKGLCEHTGSPRRELPIAVAAFVLVLALATPCLYVVVVLCRLPSRLALLRN

SEQ ID NO: 79670 - protein, 68 aa, Zea mays
  Coding DNA Sequence Number=SeqID_37891
MRGLSVNENEEEIEVTEEKAPPPLESQAGTCLYFDICGPEPDSPTNEGKPPVIGVECLNNSCIDFLDL

SEQ ID NO: 79671 - protein, 241 aa, Zea mays
  Coding DNA Sequence Number=SeqID_37892
MRGLSVNENEEEIEVTEEKAPPPLESQAGTCLYFDICGPEPDSPTNEGKPRVFDLEIPYLDSLITSIPLRVFSLVGLCNRFRISISPMFCNVCKTGETFLERTSIWVVDGDRINELRGYIRRLQDQLADRDLALDWAVQSRSVAWAKEAKARARVEELSSAIDNLQAYCNTLHEEVHVLYSQLHPSAPMDPVGSEAGPSHVAGEALGGELDLFKPPPSMRLFDEWSPTPDDEAARSNQKQK

SEQ ID NO: 79672 - protein, 142 aa, Zea mays
  Coding DNA Sequence Number=SeqID_37893
  Gene Ontology: Mol. function=aminocarboxymuconate-semialdehyde decarboxylase activity; Biological process=metabolic process
  Homolog annotation: Hit_ID=Q682E0; Match level="QueryCoverage=56%, HitCoverage=23%, E-value=9e-25, Identity=60%"; Hit description=MRNA, complete cds, clone: RAFL21-86-C08
VYVKYSALFRITREAYPYEDTAQLLSSVISHYGASRVMWGSDFPYVVPECGYKGGREAISHVASKIPVSQSDLEWILGKTLALQVREVVLITRELMATMGFASEEVIFSTLRFIADSLENLGLVLDLSAVLAPHNQVTSTQT

SEQ ID NO: 79673 - protein, 187 aa, Zea mays
  Coding DNA Sequence Number=SeqID_37894
  Gene Ontology: Mol. function=aminocarboxymuconate-semialdehyde decarboxylase activity; Biological process=metabolic process
  Homolog annotation: Hit_ID=Q682E0; Match level="QueryCoverage=50%, HitCoverage=28%, E-value=1e-24, Identity=55%"; Hit description=MRNA, complete cds, clone: RAFL21-86-C08
MSFLNIFESGNPFHKELQTTPVNKYNGHRMAEQIKLACQRLRPSSVYVKYSALFRITREAYPYEDTAQLLSSVISHYGASRVMWGSDFPYVVPECGYKGGREAISHVASKIPVSQSDLEWILGKTLALQVREVVLITRELMATMGFASEEVIFSTLRFIADSLENLGLVLDLSAVLAPHNQVTSTQT

SEQ ID NO: 79674 - protein, 311 aa, Zea mays
  Coding DNA Sequence Number=SeqID_37895
  Homolog annotation: Hit_ID=Q6QP51; Match level="QueryCoverage=15%, HitCoverage=21%, E-value=7e-09, Identity=60%"; Hit description =Putative growth-regulating factor 1
  Subcellular localization annotation: CTP_CleavageSite=20; ConfidenceScore=5.47e-01
MNKRPASKVPLQTELRFRPRGSSLPSSPRKRGRGRNVASELGSNSPPPPAWLEDASSAELEDGFHHQKLEEEVASRPVREVEPRLASLSAPARMMNILEAKGGTKIAARLASPHPGAGGHRLGCPPFGGSEGGKTQCIREREDMVAFQGGHPPFKGDSPYLRPQPSQAESSPTRSKVLPLWRGGWVPRVMQTGPGQKKPNRRARCMQPPSGYKHSSTFAQTSGGSKRRFAFVIMTASKKAGPSEGFNSRLRALGFHAHYWSEVRRPAPRKGSTAASGHSGSAPTTDQGGNDLVTESHQREASSPRTPSKGD

SEQ ID NO: 79675 - protein, 287 aa, Zea mays
  Coding DNA Sequence Number=SeqID_37896
  Homolog annotation: Hit_ID=Q6QP51; Match level="QueryCoverage=16%, HitCoverage=21%, E-value=6e-09, Identity=60%"; Hit description =Putative growth-regulating factor 1
  Subcellular localization annotation: CTP_CleavageSite=20; ConfidenceScore=5.47e-01
MNKRPASKVPLQTELRFRPRGSSLPSSPRKRGRGRNVASELGSNSPPPPAWLEDASSAELEDGFHHQKLEEEVASRPVREVEPRLASLSAPARMMNILEAKGGTKIAARLASPHPGAGGHRLGCPPFGGSEGGKTQCIREREDMVAFQGGHPPFKGDSPYLRPQPSQAESSPTRSKVLPLWRGGWVPRVMQTGPGQKKPNRRARCMQPPSGYKHSSTFAQTSGGSKRRFAFVIMTASKKAGPSEGFNSRLRALGFHAHYWSEVRRPAPRKGSTAASGHSGSAPTTDQ

SEQ ID NO: 79676 - protein, 52 aa, Zea mays
  Coding DNA Sequence Number=SeqID_37897
MSRAFDDYYIKDCSVISAPENFYRQVWHMLSNDETMQMVTYIEVCMILIVAM

SEQ ID NO: 79677 - protein, 321 aa, Zea mays
  Coding DNA Sequence Number=SeqID_37898
MAFGEPQQQNLILALIKTKYLRDCVQRIEYLLSREHLGRLRQELDGKTTVGFAFGFSIFECADLADERKPWTGNGDEGTEGWGGAYDHGVLCHLQRWQKDCNDRREDRGKAALCTHTLQQQQQAAQAQVVIHLRALLRPALEPFHDHREPTSWVDHPSVTLNLKRLQEAAEAGSGWNGWMHWLQQRLNTDSNWRSWQYSSFVAFDRLTVATTNTTDTAALSKLSTVIAGRRLWTGVAVEYNICRLINSVAVNQEMYELVSNPVDLSSEAGGLPRLKQVPAHVTTSRPLFHYYIATISIMQTSIYVMICMVSLLESTCHTCR

SEQ ID NO: 79678 - protein, 47 aa, Zea mays
  Coding DNA Sequence Number=SeqID_37899
MSRAFDDYYIKDCGVISAPNVWHVLSNDETMQIMTYIEVCMILMVAM

SEQ ID NO: 79679 - protein, 47 aa, Zea mays
  Coding DNA Sequence Number=SeqID_37900
MSRAFDDYYIKDCGVISAPEVWHVLSNDETMQIMTYIEVCMILMVTM

SEQ ID NO: 79680 - protein, 47 aa, Zea mays
  Coding DNA Sequence Number=SeqID_37901
MSRMFDGYYIKDCGVISAPEVWHVLSNDETMQIMIYIEVCMILMVAI

SEQ ID NO: 79681 - protein, 47 aa, Zea mays
  Coding DNA Sequence Number=SeqID_37902
MSRVFDGYYIKDCGVISAPEVWYVLSNDETMQIIIYIEVCMILMVAM

SEQ ID NO: 79682 - protein, 47 aa, Zea mays
  Coding DNA Sequence Number=SeqID_37903
MSHAFNDYYIKDYGVISAPEVWHVLFNDETMQIMTYIEVCMILMVAM

SEQ ID NO: 79683 - protein, 47 aa, Zea mays
  Coding DNA Sequence Number=SeqID_37904
MSRAFDDYYIKDCGVISAPEVWHVLSNDETMQIITYIEVCMILMIAM

SEQ ID NO: 79684 - protein, 47 aa, Zea mays
  Coding DNA Sequence Number=SeqID_37905
MSRVFDDQYIKDCGVISAPELWHVLSNDEIMQIMTYIEVCMILMVAM

SEQ ID NO: 79685 - protein, 47 aa, Zea mays
  Coding DNA Sequence Number=SeqID_37906
MSRAFDDYYIKDCCVISASEVWHVLSNDETIQIMTYIEVCMILMVAM

SEQ ID NO: 79686 - protein, 47 aa, Zea mays
  Coding DNA Sequence Number=SeqID_37907
MSRAFDDYYIKDCGVISAPEVWHVLSNDETMQIMTYIEICMILMVAM

SEQ ID NO: 79687 - protein, 69 aa, Zea mays
  Coding DNA Sequence Number=SeqID_37908
MATYPGGKTGPWRRSSPDPPRRTSLVHNFPDYAGQHNEEKNANTGMGNSPRLGLRSNRATLGADLAAAV

SEQ ID NO: 79688 - protein, 91 aa, Zea mays
  Coding DNA Sequence Number=SeqID_37909
MATYPGGKTGPWRRSSPDPPRRTSLVHNFPDYAGQHNEEKNANTGMGNSPRLGLRSNRATLGADLAAAVPHTGRIDDQPRVPELRRSHTKR

SEQ ID NO: 79689 - protein, 204 aa, Zea mays
  Coding DNA Sequence Number=SeqID_37910
METPCSAPSEGNMALSPLPPCGKATKGRAFKYKDRLAHYPDTRASVGKVEPQAQQEAPPRLTLGLGLRRKSPPCPTPWLGPRLGLGRWSPPRPTPGLGLNLDLRRKSPPRPTPGLGPASASEGGLRLARPQGSASTSTSEGGLRLARPQGPASTSTSGGIASSPDPGLCLRRSLRLARPWARTDHAAGGLKRSSDGHDTAYTGL

SEQ ID NO: 79690 - protein, 200 aa, Zea mays
  Coding DNA Sequence Number=SeqID_37911
MFGALRGQHGAFPPSSLRKGDEGARIQYKDRLAHYPDTRASVGKVEPQAQQEAPPRLTLGLGLRRKSPPCPTPWLGPRLGLGRWSPPRPTPGLGLNLDLRRKSPPRPTPGLGPASASEGGLRLARPQGSASTSTSEGGLRLARPQGPASTSTSGGIASSPDPGLCLRRSLRLARPWARTDHAAGGLKRSSDGHDTAYTGL

SEQ ID NO: 79691 - protein, 223 aa, Zea mays
  Coding DNA Sequence Number=SeqID_37912
  Gene Ontology: Mol. function=protein kinase activity; Biological process=protein amino acid phosphorylation
  Homolog annotation: Hit_ID=Q6K8I5; Match level="QueryCoverage=85%, HitCoverage=41%, E-value=3e-64, Identity=67%"; Hit description =Putative membrane related protein
MAPFALGSQVVAVASVSVGLNSSVRGVALKECEHPLAARQRKFVRVQLLRSGWCIRKIPGRDACQITVLHHEDNGMNIEMAKLAFSKGIWSYICKMSNALRRYPQHGSPSVSILTMQKLMKKDLTNLSLFACQFPKDLETADASLSASQNTAASVVPSTPTSRTSPCKLAGRKSRQMIASGILLVGSIVCLSRGRSNLGAQLAMAFFLKKAFKQERQSGSSST

SEQ ID NO: 79692 - protein, 223 aa, Zea mays
  Coding DNA Sequence Number=SeqID_37913
  Gene Ontology: Mol. function=protein kinase activity; Biological process=protein amino acid phosphorylation
  Homolog annotation: Hit_ID=Q6K8I5; Match level="QueryCoverage=85%, HitCoverage=41%, E-value=3e-64, Identity=67%"; Hit description =Putative membrane related protein
MAPFALGSQVVAVASVSVGLNSSVKGVALKECEHPLAARQRKFVRVQLLRSGWCIRKIPGRDACQITVLHHEDNGMNIEMAKLAFSKGIWSYICKMSNALRRYPQHGSPSVSILTMQKLMKKDLTNLSLFACQFPKDLETADASLSASQNTAASVVPSTPTSRTSPCKLAGRKSRQMIASGILLVGSIVCLSRGRSNLGAQLAMAFFLKKAFKQERQSGSSST

SEQ ID NO: 79693 - protein, 92 aa, Zea mays
  Coding DNA Sequence Number=SeqID_37914
MQESLAGPPSQQKSSRGPPYTDHSPTALAPFGAEEGLPAQGIDEIVWRRRDAFATRREFHQVCTEDQPTRPPRPNTDRSHPKIGTQGPKHMR

SEQ ID NO: 79694 - protein, 463 aa, Zea mays
  Coding DNA Sequence Number=SeqID_37915
MAVRFKLSGQIFPLAKGTCVGPQNTLSPVEPPVLAKTRPRAEEGLPAQGIDEIVWRRRDAFATRREFHQEGRTTRHIYPTVESDPESPAEDSLVWRRPVRRSGGNEIDGSGYDYGAGKWYSFRLERMARLRHTARKSIIPFLPSRLAERPLRHPVAGQSSHLERLHHRLHEEQERQRQEQLGSSFSLHQEIESVRSCSPVLPLEAPPAPPLGAPTSGVAAGGDPDDGGGDDSSSHDTDFSADQEPEGWVARPITRDAARGCHFHDALDTLLRRALNRRTWSIEYRCVVYQHSRGVYPDRWEATCLVRRPKNSLQGAEACSEHYSISERDSAEAAMQDAARRALSHYCSVLGEVADGLNLKYYPCRPSGSTGGVIVSPIGEDNPRLSSKVNLAAVLNTELDHALDELSRARAEIALLWAERAERRHLDDGSPAPVGTQHPYRSPRRGRQSYGNPDCKTKINLEP

SEQ ID NO: 79695 - protein, 65 aa, Zea mays
  Coding DNA Sequence Number=SeqID_37916
MAPAPRIASPLLGLLVPLRSGQPDRQLKKRIDLFYRRSVEDGFGDGNVLLASSKWRHHNPYKLVP

SEQ ID NO: 79696 - protein, 54 aa, Zea mays
  Coding DNA Sequence Number=SeqID_37917
MGQVIYIGANDKDRQLKMRIDLFYGRSVEDGFGEGNVLLASSKWRHHNPYKLVP

SEQ ID NO: 79697 - protein, 111 aa, Zea mays
  Coding DNA Sequence Number=SeqID_37918
MQMINICREASYIPSKSGCKNHLLGCSVVQLAAWRTTTWEKDTDIDFAQDAIDEYKLFGSLDYIDVDYNLLIVIITCLADRQLKMRIDLFYGRSVEDGFGEGNVLLLVSIK

SEQ ID NO: 79698 - protein, 160 aa, Zea mays
  Coding DNA Sequence Number=SeqID_37919
  Homolog annotation: Hit_ID=Q9SI41; Match level="QueryCoverage=26%, HitCoverage=2%, E-value=3e-10, Identity=75%"; Hit description =Putative chromodomain-helicase-DNA-binding protein
  Pfam annotation: Domain name=Chromo; Domain location=41-97; Score =31.9; E_value=2.2e-06; Accession=PF00385.14; Description='chromo' (CHRromatin Organisation MOd
MPDAPTASTRLRPGRPDAARRPWPPAPCPGEPTLARAKNAAIASRAENFKMVIKADGDDLVPEYLVKWQGLPYAESTWEKDTYIDFAQDAIDEYKLFGSLDYIDVDYNLLIVIIACLADRQLKMRIDLFYGRSVEDGFGEENVLLASSKWRHHNPYKLVP

SEQ ID NO: 79699 - protein, 344 aa, Zea mays
  Coding DNA Sequence Number=SeqID_37920
  Gene Ontology: Mol. function=DNA-directed RNA polymerase activity; Cellular component=chromatin; Biological process=chromatin assembly or disassembly
  Homolog annotation: Hit_ID=Q1SJG5; Match level="QueryCoverage=78%, HitCoverage=25%, E-value=1e-67, Identity=46%"; Hit description=SNF2 -related; Chromo; DEAD/DEAH box helicase, N-terminal; DNA-directed RNA polymerase, subunit beta-prime
  Pfam annotation: Domain name=Chromo; Domain location=172-231; Score =2.6; E_value=0.46; Accession=PF00385.14; Description='chromo' (CHRromatin Organisation MOd
  Pfam annotation: Domain name=Chromo; Domain location=232-287; Score =59.7; E_value=9.4e-15; Accession=PF00385.14; Description='chromo' (CHRromatin Organisation MOd
  Pfam module annotation: Pfam domain module=Chromo::Chromo; Domain location=172-231::232-287
GTLNSQDKFMDSENSDGDDDDDLELSDDEDDFVENRRQPKRLKIVATKTSKGGQLPMPVQPKRGVSHSDEEYFSGKDSDVPSDSDFKHIPKKPDRLHQKPVGRSDVAPISSHNELRTSGRRRTVKKISYAESEESDDSEEKSNKRQKLIKEEPEEEDGETIEKVLWHQPKGVAEEAIRNHRSAQPTVASLTSDFDQQWDELEFYIKWKGQSYLHCQWKILSELQSVSGFKKVEVERIFADRVSKADGDDLVPEYLVKWQGLPYAESTWEKDTDIDFAQDAIDEYKAREAASAILGKTVDFQRKKSKASLRRLDGQPEWLKAGKLRDYQLEGLNFLVNGYVEKRY

SEQ ID NO: 79700 - protein, 134 aa, Zea mays
  Coding DNA Sequence Number=SeqID_37921
MLPARNKALIRNEEGDSNTMELLTAAGGQWRELATEKRGPAAALELRRAIPTSPAPNRTRKGHGRDEQGATTRYKSPEAIRGLQQSLRDGLGLPRAKTVNPSRNRVEFVLVAREEDGPGRWAPPAVAQKGNAQR

SEQ ID NO: 79701 - protein, 478 aa, Zea mays
  Coding DNA Sequence Number=SeqID_37922
MGRWIRIPRIRSDLPEIESGRGENRTIHDLRQRSNPTESLVDPHSIPDVLRTHPVTHGLPGGDVRGRRMRQRVDPERIVAAQRRYKSPEAIRGLRQSLRDGLGLPRAKTVNPSRNRVEFVLVAREEDGPSRWAPPAAFSEAELMARLRHTARKSVIPFLPSRLAERPLHRTVSGQSSHLERLHHRLREEQERRRQHGEQQGSSSSPQQEVETVRPRSSVAQLEAPLVPPRDAPAVGGATGGDPDDDDSDHSTESSEPQEAEGWVARPITRDAARGCHFHDALDTLLRQAFDRHTWSIEYRCVVYQHSRGRYPDRWEATCLVRRPEDDLRGAEAVSEHYSISERDTAEAAMQDAARRALSQYCSLFGGVADGLNLRYYPRRPTGSTESVVVSPVGEANPRLSSTVNLVAVLNTELDHSLDELSRARTEIAELRAELAERHHQEGGSPAPVGTQHPYRSPPRGHHTYGSPVCKTRIDLDP

SEQ ID NO: 79702 - protein, 128 aa, Zea mays
  Coding DNA Sequence Number=SeqID_37923
  Gene Ontology: Mol. function=DNA binding
  Subcellular localization annotation: CTP_CleavageSite=40; ConfidenceScore=5.28e-01
MASPGAMKQWCDDVDRLLGMAHSSSTRSRPWSSQRQREATASVRSPSMRGAQTDDLWAELNRKRAGDDAPVSLERPDDLRAELNRRRAGEDARVSLERARERRQNVEGRNLDYDFAVVAPQTPMRARI

SEQ ID NO: 79703 - protein, 309 aa, Zea mays
  Coding DNA Sequence Number=SeqID_37924
  Gene Ontology: Mol. function=DNA binding
VGGLGFRFLLVLLLDAMVHIVEHHDFLPEDFMVEEAAASPTPLATNLPAPGAATAVHSAQQHTPAQTSRASRVVPGALSAARELLRHPPSSMASLGAMKQWRDDVDCLLGMAHSGSTKPRPRSSRRQHEASASVRSPSGGPHRLRTCGRSSTAGGARERRQNVEGCNLDYDFAAVAPQTPTANFASAYQQHGVEAHLHAVRQELGETLRAFISRFTKDGKKKKKKNHVHEKPSSSALVIAAATGAGTSATSAHSHRGTSRDGSPPCRRPGKERVDSGEVAAGERDLGYQSPEGVLKDVFTGGSDSGDDS

SEQ ID NO: 79704 - protein, 91 aa, Zea mays
  Coding DNA Sequence Number=SeqID_37925
TKSLGCENQGQSDARRKKERTLTRDTYPRSGRIKGWERAPASGFPNVPATHLWRSSTGRRSEDIHKPSKSAPGIISQSGSRRSVKGSTLRQ

SEQ ID NO: 79705 - protein, 70 aa, Zea mays
  Coding DNA Sequence Number=SeqID_37926
MEFAQSGGRRLCAMAAGNWRLRSAMDEPAGINPKYQKVLLRHYTFQTNIYILVWCQNHISILVWCQNQFL

SEQ ID NO: 79706 - protein, 449 aa, Zea mays
  Coding DNA Sequence Number=SeqID_37927
  Homolog annotation: Hit_ID=Q5JKR1; Match level="QueryCoverage=46%, HitCoverage=17%, E-value=2e-81, Identity=77%"; Hit description =Chloroplast processing enzyme-like protein
  Pfam annotation: Domain name=Peptidase_M16; Domain location=112-252; Score=26.0; E_value=4e-06; Accession=PF00675.10; Description =Insulinase (Peptidase family M16)
RHRHLPPAAMDLLPPPTDAPDAGGPSAGGSGRGLRRGIGFRSLKLVSVAMDETLPVDPVGATYGRLANGLTYYVRSNPKPRMRAALSLAVKVGSVLLLSPRLLFLPPLFIPLRAFADFHVVLIARFALRSVVEEEDERGVAHIVEHLAFSATARYTNHDIVKFLESIGAEFGACQNALTSSDETIYELLVPVDKPGLLSQAISVLAEFSSEVRVSAEDLEKERGAVLEEYRGGRNAAGRMQDSHWALLFDGSKGSYGANVYEHYMTSVAFSITTECHVQYCRAIALVRDLEQMSNGAAGLASRLYVEGRGKREEGGGGLTGGVPGGRPTASGGRRRLLSLGAISSGAMEFAQSGGRRLCAMAAGNWRLRSAMDKQAGPAVQSGPIPTGLLYSAHLKPDGTMQHVLCSLPLPLKVLLLLSTAAATEGLLAPVEAQGGPTPSAQGLMGPRA

SEQ ID NO: 79707 - protein, 238 aa, Zea mays
  Coding DNA Sequence Number=SeqID_37928
MGGIRRLSASSLEERNSMGVGTSQPSFGFKDFHHAAWPYPATGGHPRWPRWKTRRVGGPPPRGSAAPFFPLRLGVKGVLEPHGDFLQPCQDMQGARGPGSPSPCLNGCLFDYLNRFTKHELPRVKVTGEAGGSDISMNRGGVGSRMGTWGNRLSRLLGPDSRRSPWTATPPEAGSGFAEDVVDAEGATAPFGAKTRACRIRSSCSVCFLRPPRPEENTLAALAKLRLFSSCFEHLDFA

SEQ ID NO: 79708 - protein, 279 aa, Zea mays
  Coding DNA Sequence Number=SeqID_37929
MGGIRRLSASSLEERNSMGAGTSQPSFGFKDFHHAAWPYPATGGQDGRGGESGGRLRVGRLPLSSPCARGGGEPFCRDTSPKAAAYAASLSGQGSTRSRLFDYLNRFTKHELPRVKVTGEAGGSDISMNRGGVGSRMGTWGNRLSRLLGPDSRRSPWTAAPPEAGSGFAEDVVDAEGATAPFGVKTRACRIRSSCSVCFLRPPRPEENTLAALAKLRLFSSCFEHLDFVGNRDVCVSKSCFSRKGRVRYPYPRGVGIPRLGRPCRLRVLSPVHEALSPT

SEQ ID NO: 79709 - protein, 191 aa, Zea mays
  Coding DNA Sequence Number=SeqID_37930
  Subcellular localization annotation: CTP_CleavageSite=23; ConfidenceScore=5.00e-01
MPRTQSTTSPPQSLAQRPPAAIPAAELRHLPADSPLLAPSSQIKPTPRIAQPLPVLSHLPVSQEPGHRRANRRRAHRRPGFLPRGRSVRPRRRPAAPFPPLLSLTCGPRGDAVASAHSRRLPARGPQLGHKRARARSRPAEEGSDPPELIAPEEGQEPDPSEINLLCQENFDEGKSILPLMHKLPILSTTA

SEQ ID NO: 79710 - protein, 78 aa, Zea mays
  Coding DNA Sequence Number=SeqID_37931
  Subcellular localization annotation: CTP_CleavageSite=23; ConfidenceScore=5.19e-01
MPRTQSTTSPPQSLAQRPPATIPAAELRHLPADSPLPAPLAKSSLPLGSPAPARAKPPPPGRGIRSSGTYSSGRRART

SEQ ID NO: 79711 - protein, 223 aa, Zea mays
  Coding DNA Sequence Number=SeqID_37932
MAHLIARSTCGFGRPKSSDDDLAILVRQGFDSCLEKLHGSSGKLSKCSVEAEGLWKRLATVAGARVARAGGAELVEAKGGVWPVRDREVKAQARAEELSTAVDNMQMPSQTHAHDNAGTSRGQDDTPNPPLVPPTLAEAITALVTATADNTRFFVKRRDNNFSSKVEELIRKDPTKLRIWISRKLVPHYSSKLKIPSKLTNGFGSLSRSLDSTETQKPLFVAQ

SEQ ID NO: 79712 - protein, 216 aa, Zea mays
  Coding DNA Sequence Number=SeqID_37933
AGPRAQVGELVGGEGFGLSRAGFDSCLEKLHGSSGKLSKCSVEAEGLWKRLATVAGARVARAGGAELVEAKGGVWPVRDREVKAQARAEELSTAVDNMQMPSQTHAHDNAGTSRGQDDTPNPPLVPPTLAEAITALVTATADNTRFFVKRRDNNFSSKVEELIRKDPTKLRIWISRKLVPHYSSKLKIPSKLTNGFGSLSRSLDSTETQKPLFVAQ

SEQ ID NO: 79713 - protein, 392 aa, Zea mays
  Coding DNA Sequence Number=SeqID_37934
  Homolog annotation: Hit_ID=Q75L11; Match level="QueryCoverage=26%, HitCoverage=66%, E-value=3e-38, Identity=79%"; Hit description =Probable histone H2A.6
  Pfam annotation: Domain name=CBFD_NFYB_HMF; Domain location=35-99; Score=14.8; E_value=0.0066; Accession=PF00808.13; Description =Histone-like transcription factor (CBFNF-Y) and archaeal histone
  Pfam annotation: Domain name=Histone; Domain location=29-102; Score =98.9; E_value=1.5e-26; Accession=PF00125.14; Description=Core histone H2AH2BH3H4
  Pfam module annotation: Pfam domain module=CBFD_NFYB_HMF::Histone; Domain location=35-99::29-102
  Subcellular localization annotation: CTP_CleavageSite=28; ConfidenceScore=5.22e-01
MDGGGAKAKKAAAGRKLGGGGPKKKPVSRSVKAGLQFPVGRIGRYLKKGRYAQRVGTGAPVFLAAVLEYLAAEVLELAGNAARDNKKTRIIPRHLLLAIRNDEELGKLLGGVTIAHGGVLPNINPVLLPKKAAERAEKAAAAGPNGGHGSRRSAFSLLPPSLSSPPLTITTLGRLAPEPPPQRKPRAKPVPSSASLLALISPRPPSARKLARIAFAAGPWLSDRTGPAAVTPAPLSVVLVPPVPDHRVGIFADLRIELFVFGSKIKCIQADSIANKAIGRMQDISDKIFSVARETIRPGRGLTSFDATKLRVALEEIACMLEQDSLVLQEHLDIMNNVNIPVDSSYEPSTLSSPPPSDDDLTPHWDFAEHFQNFWGVEYDSDQMPSFSENDV

SEQ ID NO: 79714 - protein, 197 aa, Zea mays
  Coding DNA Sequence Number=SeqID_37935
  Subcellular localization annotation: CTP_CleavageSite=48; ConfidenceScore=5.23e-01
MWLFGSASGRLLAARSRSCYQTRRFWAGFCATRFVTPAPLSVVLVPPVPDHRVGIFADLRIELFVFGSKIKCIQADSIANKAIGRMQEISDKIFSVARETIRPGRGLTSFDATKLRVALEEIACMLEQDSLVLQEHLDIVNNVNIPVDSSYEPSTLSSPPPSDDDLTPHWDFAEHFQNFWGVEYDSDHMPSFSDNDV

SEQ ID NO: 79715 - protein, 120 aa, Zea mays
  Coding DNA Sequence Number=SeqID_37936
  Homolog annotation: Hit_ID=Q9S7E7; Match level="QueryCoverage=53%, HitCoverage=8%, E-value=9e-12, Identity=58%"; Hit description =Putative heat-shock protein
MVAGTSNVVSLKLMGGALIGRCYESCAAAVDSTDPPAEKHEYQAEVNRLMDLIVHSLYSNKEVFLRELVRCVVTGSVALLGLWKNMKICWGQLGNALQHDCKTIKMIYTKIALEALLFSA

SEQ ID NO: 79716 - protein, 331 aa, Zea mays
  Coding DNA Sequence Number=SeqID_37937
MGAKAAASSAGKQPSGGPVKGQRLHSPAHTDEAAARVADFDTDICVADYLVGSDVGQLAVVPTPVAATSPTAAVGAKGAPRDPWSTFCVSGEISSVAAAKDVAGSVFQQLRQASQQLKHATDFADHVVSGALTAEFAAEVERLRAQHADAVREKSAAESKSRRLTERLAAMEVEKGDLRRQLVEERREANKAIADAQAAQAEAKLARAKGSLARQRAEELEARLNILRNHVDKAKASTRAEVERTHAQFVDAYRELGARTAAFEAPGQEVGLRFLEWLQEELGVLPTIVMGLMSFASIVTCEGAVNALSREGCGHFEVFDQSDENFKREIF

SEQ ID NO: 79717 - protein, 92 aa, Zea mays
  Coding DNA Sequence Number=SeqID_37938
  Homolog annotation: Hit_ID=Q2QV41; Match level="QueryCoverage=47%, HitCoverage=26%, E-value=9e-09, Identity=68%"; Hit description =Expressed protein
MAKARRDNPRRRRHDNPEVRGRAELREAAHLKAVLGKMQFQLDPFAAIHQHLLATQPPAAAKGDAVKEGKDSKNKKRRRKKGASSSSQAMDI

SEQ ID NO: 79718 - protein, 110 aa, Zea mays
  Coding DNA Sequence Number=SeqID_37939
  Homolog annotation: Hit_ID=Q2QV41; Match level="QueryCoverage=73%, HitCoverage=52%, E-value=6e-19, Identity=65%"; Hit description =Expressed protein
MAKNTRSRCQKKLKAYDLSALSESLLEPGAPKQKPEAKLNCKLREAAHLKAVLVKMQFQLDPFAAIHQHLLATQPPAAAKGDAVKQGKDSKNKKRRRKKGASSSSQAMDI

SEQ ID NO: 79719 - protein, 466 aa, Zea mays
  Coding DNA Sequence Number=SeqID_37940
  Homolog annotation: Hit_ID=Q6QP54; Match level="QueryCoverage=17%, HitCoverage=42%, E-value=3e-20, Identity=55%"; Hit description =Putative kinase
  Subcellular localization annotation: CTP_CleavageSite=62; ConfidenceScore=5.76e-01
MGEGLRSNRRLTSGSPPPALTTTTTTPTFAQTNGRKGRAVMQAACNRARWTRFSDSQRAGMEAQAHASRNRRARCCMQATAPPLAPPPRLFGCGTNTATRGGPAHDPATPAWRDGQYDRKAPVIRSSNGSRTRNGRPANNSPRRINSAAGQATLLAGEAGDASPSPLALRGVQQSPQIAWALHPLLVKGSKAGPPKGSTAASSYSGSAPITDQGARTRAQPQKTTNSASPDPRARTPPWPLPNDLRLARPRSSGSASAMEDRLDLGFGGASTSPDLGHRPATSTGSAIITLPRADPGRREQDRSLTEAGGRQQGLNRSDSCPSARLRCSSDSHDITPAGCQDLSGCHIGMAFLEKVGRAGTRTGQALSWGRSLPSPAWTLVTPYCKRTRPGRGTNTKAAGFPPLSRPSPAASLPPFALAHALDPSGLGHAAHSLVGLGTPRSRDADTLEKCIPAVTVKKDAVDCEL

SEQ ID NO: 79720 - protein, 466 aa, Zea mays
  Coding DNA Sequence Number=SeqID_37941
  Homolog annotation: Hit_ID=Q6QP54; Match level="QueryCoverage=17%, HitCoverage=42%, E-value=5e-21, Identity=56%"; Hit description =Putative kinase
  Subcellular localization annotation: CTP_CleavageSite=62; ConfidenceScore=5.76e-01
MGEGLRSNRRLTSGSPPPALTTTTTTPTFAQTNGRKGRAVMQAACNRARWTRFSDSQRAGMEAQAHASRNRRARCCMQATAPPLAPPPRLFGCGTNTATRGGPAHDPATPAWRDGQYDRKAPVIRSSNGSRTRNGRPANNSPRRINSAAGQATLLAGEAGDASPSPLALRGVQQSPQIAWALHPLLVKGSKAGPPKGSTAASSYSGSAPITDQGARTRAQPQKTTNSASPDPRARTPPWPLPNDLRLARPRSSGSASAMEDRLDLGFGGASTSPDLGHRPATSTGSAIITLPRADSGRREQDRSLTEAGGRQQGLNRSDSCPSARLRCSSDSHDITPAGCQDLSGCHIGMAFLEKVGRAGTRTGQALSWGRSLPSPAWTLVTPYCKRTRPGRGTNTKAAGFPPLSRPSPAASLPPFALAHALDPSGLGHAAHSLVGLGTPRSRDADTLEKCIPAVTVKKDAVDCEL

SEQ ID NO: 79721 - protein, 73 aa, Zea mays
  Coding DNA Sequence Number=SeqID_37942
METAAATARPGAARKRRWNQSQPCQGEGPSDLKFARLRFDGDGGAKGAWEHLDLVLSLQSKELSLERMIEAKH

SEQ ID NO: 79722 - protein, 1103 aa, Zea mays
  Coding DNA Sequence Number=SeqID_37943
METAAATARPGAARKRRWNQSQPCQGEGPSDLKFARLRFDGDGGAKGAWEHLDLVLSLQSKELSLERKIELAVEFLTTLPNNSSCSIQLLRLVSFIGNWLQSILNFPENSKKILHIFDPALDSRCWAILRVCVEKKPSISISLNLLKSLSRVASHGLGRVDSNTSCPDNESIELFEQVFDCMSLLFSSNTRAFFNAGVDLWASCAIEVVNLAQKVSAKKDNFCPVLQKLANCLLGQFACFLRFYANPKNIFHAFVDKVLGPLLELLVLLNSQAHSSEHKQTGTMLKIVEDVFSNGLFHPQHLSGYFGLRSLNKSSAAKDIKGSYHRHLFQRFKGIKTENKAVLLAGFGYLFQLFVRRARNQRTTVAPSRTTLGTLHKSNDGSEEPQHRESLFEVFIMFMEPIVLECKSYSQKDFSKLGVTRLVEVHCMLKSINVMLITLIEEKIYVPTEDTLEGSHFNFLQDIYSVLILISEKMYKFWMSAVHLEDVNIKKIVPLMFAEIISAVGNFLEIEYKVLGDDLVKLWLMIFALSAINTSSKDIEPCFLLASKISSLSAQVICTFSELRQVSRSIFSLCDAVRAFRVEGPDGVHGSFSVASLSSQECLGSLTTLLSSETLMGAIRTSIKSMPQGQSSRCIEELTSDLTETLNWMADCSFEDDVSKLREPSIARKSIFCQKAELLGRHLSEVYASILDSITVTVSNSTLVGKSVERSLYQQSIGLMPPDVAIDATKLVGNPFIVCSGKEWTNPTNILGKGYFALIDENSNSLLDVIESLSESLSTNCASFAPLVYIFHVMVLQRLNDLNRQIKAFQFLLEDDAWQIDNKDIGNTRLLKESCSLEAAKLMSFVMNYVKLLSSGETGPFGSYDVSSSWDLSLCSLDEGSFPIATWQLLCENIDVWSSHVSKKDLKNFFSNLIRFSFTQKRSSLDKENNGTQSSGREMTLHSVSIGVLCDTIIYEKKVILKNLASSFCHALKKSFSFVTNSDGDNVFLDTSPDLMETISNLENEKLIGTGSGATHAHCLDKHWICEDFLNFFSAVPGFHANSKAFIRLINYILHLERQVEKMFTNTYRFHAEVSIKRRLSERAHRARCLARLALWSKASATA

SEQ ID NO: 79723 - protein, 134 aa, Zea mays
  Coding DNA Sequence Number=SeqID_37944
  Gene Ontology: Mol. function=two-component response regulator activity; Cellular component=voltage-gated potassium channel complex; Biological process=two-component signal transduction system (phosphorelay)
  Homolog annotation: Hit_ID=Q9ZQW0; Match level="QueryCoverage=76%, HitCoverage=65%, E-value=1e-42, Identity=89%"; Hit description =Response regulator 1
  Pfam annotation: Domain name=Response_reg; Domain location=36-133; Score=24.5; E_value=4.5e-05; Accession=PF00072.14; Description =Response regulator receiver domain
MATAAAAPASVAPSLAPKANDSRKAVVPVDASELEKHVLAVDDKSVDRAAIARILRGSRYRVTAVESATRALELLAMGLLPDVSMIITDYWMPRMTGYELLKRVKESAALRGIYVVIMSSKTIVIYTFSNKILR

SEQ ID NO: 79724 - protein, 75 aa, Zea mays
  Coding DNA Sequence Number=SeqID_37945
  Gene Ontology: Mol. function=two-component response regulator activity; Cellular component=voltage-gated potassium channel complex; Biological process=two-component signal transduction system (phosphorelay)
  Homolog annotation: Hit_ID=Q9ZQW0; Match level="QueryCoverage=77%, HitCoverage=37%, E-value=2e-18, Identity=81%"; Hit description =Response regulator 1
MESATHALELLAMGLLPDVSMIITDYWMPRMTGYELLKRGKESAALRGIYIVIMSSMTISLIAANITDTNMDERL

SEQ ID NO: 79725 - protein, 138 aa, Zea mays
  Coding DNA Sequence Number=SeqID_37946
MRVAWDALSQVIREVLCWVLVWVIGDGGICYGSYILAQGFRYGSHPMAFPEGGGYRFGYVRWSLYSGHFQHPHSEDPGEMPRSDTLPDHLRRDQWGVALLGQKGNNDSWVKCATSVKCYETDISVVLTVKSGLGILFD

SEQ ID NO: 79726 - protein, 92 aa, Zea mays
  Coding DNA Sequence Number=SeqID_37947
MAFPEGGGYRFGYVRWSLYSGHFQHPHSEDPGEMPRSDTLPDHLRRDQWGVALLGQKGNNDSWVKCATSVKCYETDISVVLTVKSGLGILFD

SEQ ID NO: 79727 - protein, 110 aa, Zea mays
  Coding DNA Sequence Number=SeqID_37948
MELRSKRKRQRAKRRRGVVEQALLLHPPTDSFSNEDHDAPLVMHDEAGGDESSQPVVPVEPTCVLDFSNGMGVWPKRKWHSDELCTSWWLAPDQRFLALRLWREWRVAST

SEQ ID NO: 79728 - protein, 844 aa, Zea mays
  Coding DNA Sequence Number=SeqID_37949
  Homolog annotation: Hit_ID=Q6Z1K3; Match level="QueryCoverage=21%, HitCoverage=37%, E-value=3e-20, Identity=33%"; Hit description=Zinc knuckle domain containing protein-like
  Pfam annotation: Domain name=zf-CCHC; Domain location=203-220; Score =11.0; E_value=0.015; Accession=PF00098.13; Description=Zinc knuckle
  Pfam annotation: Domain name=zf-CCHC; Domain location=222-239; Score =13.2; E_value=0.0065; Accession=PF00098.13; Description=Zinc knuckle
  Pfam module annotation: Pfam domain module=zf-CCHC::zf-CCHC; Domain location=203-220::222-239
  Subcellular localization annotation: CTP_CleavageSite=80; ConfidenceScore=5.70e-01
MAALPSPALPSSAPVPSPPGANLSTSLTPASTPDPAATPSSSTPLVSGPNAPCHPTSHAAKIFIHRSPLPVFNLKPATTSAHHVPAPGSSTHHVPASQTGRSKSQRWTDASDYSLSSGGSSLVPDSYKAAVLSCSKSTLPRSTSDARPPIDGTTAVCRRAEVSCQKPVVKLDSAAGGWQLVKSRRARRSEQVSRRRSLVDLRGRCFNCLSFSHHASSCWRPTRCFRCFKFGHRAALCSVQTVAVKKAAGQQRDQQGLRVPVWQRLSGMDGPGHQDLQRKGSVWRRITPSQSAAGTESSTQPALMAASSGATAPALRSMRKRRRAKRRRGVVEQALLPLPPPSDHDAPLVMQEEAGSDESSVEPTCVLELSIGMAQEEVALRRALYVMVVGTRPKVLGAEVVEEVARCFGIDADSLAIHQAMPEDFLLFLPNEDTATRVFNEGKVFRGPRFNLQFKRWSRFTHATAGALPFLVDVQIWGIPAHAWARSTAEHLLHDSCLVSDIHPATALKSDLSSFKLRAWCFDPKKLHRNMKLYIAEPGMVTSEKRCLSYNISMAAFPVDASSGAEDSPPPPPADGTHPDGDNERHRPDSPSRHPRKGAGQRRSIHLRLGPQQTEGCGWGAATLTNADPFMTGASGCDGLELYPETGPLDLAVHASPLHDNLSAGLFELNGPGSPQSRLVSVSGDITGGDMLKKMHSQVDIVAVFADGLSGQHSNGFDGLEMRSGTGPLDLAIHVPPLHNAMCAGLLELSGAGSPQARLVWGTVDTTGTASPQIHNGSLELAQFCPPLIPLPQTDRPLKVYYRKKKRKQTKAHGGVSGVCNWAQYSYKISTEKSGSVWRNWGYI

SEQ ID NO: 79729 - protein, 280 aa, Zea mays
  Coding DNA Sequence Number=SeqID_37950
LGGRRKHTLQDNPILQARILTAGGSSSTLGIDDTFGQGQPSLGRRRGPRISTLEDDVITTPGPSPLGSSPGIRPEQAARPVTPGPRPVTFQGRQSGPSRRLGRSPRGLGQLPSKDVSPTRGLGWTIPASVPLTDDPARLRPTRFPFRANSASVHVDAATPGLSSSKSDRGVPLTKLEKPRTTRPTEPRNSYASGIRIPHSSPVHGATHAWYEQPHSTGERPAEQQKIDERLVVARPSRGDDDDYCPRGPNSSSDDLRADAAAQEALARAQTREARTGRRL

SEQ ID NO: 79730 - protein, 336 aa, Zea mays
  Coding DNA Sequence Number=SeqID_37951
MDGKHTLQDNPILQARILTAGGSSSTLGIDDTFGQGQPSLGRRRGPRISTLEDDVITTPGPSPLGSSPGIRPEQAARPVTPGPRPVTFQGRQSGPSRRLGRSPRGLGQLPSKDVSPTRGLGWTIPASVPLTDDPARLRPTRFPFRANSASVHVDAATPGLSSSKSDRGVPLTKLEKPRTTRPTEPRNSYASGIRIPHSSPVHGATHAWYEQPHSTGERPAEQQKIDERLVVARPSRGDDDDYCPGGRTAAAMTSGRMLLPGGPRPCPNSRGKDGQKAVELEVGPRVAPANSSAAEPLPAAMAGGGTGSGSEAARPSEPGTVQLSAPQTTPALPPDH

SEQ ID NO: 79731 - protein, 214 aa, Zea mays
  Coding DNA Sequence Number=SeqID_37952
PFSTGSMVRIDHVKRYAYCLIVAVGQNPRVRRPIPYPPPSHGGALRTHGGALAVTTSRTTARGGADAGRRPGEEFPRPQKLILVAMLRRSFSRFSGATSARIGEAGDDAWAPAISGRVMVGAPGPPDSDEEARKVGCNRPRVGGSATGSVAPPVGVWGERAARGLREHGEVGLLEGFGPGAGHSGHPELSKREHVAPGHSGHPELSKREHVAPV

SEQ ID NO: 79732 - protein, 118 aa, Zea mays
  Coding DNA Sequence Number=SeqID_37953
MAGWLWDFAGAPLHKIPAEGPFSTGSMVRIDHVKRYAYCLIVAVGQNPRVRRPIPYPPPSHGGALRTHGGALAVTTSRTTARGGADAGRRPGEEFPRPQKLILVAMLRRSFSRFSGAT

SEQ ID NO: 79733 - protein, 224 aa, Zea mays
  Coding DNA Sequence Number=SeqID_37954
MGREEEVEDGCSQRHCANPVKSAKPAPAPMEDHIANDTVLKLSILGCICSRVSLSSLLFRLARGVEEGRDKDTVGGSLQRIDDFHSFSGQGYKVLMEPVVLNRERAATDQRKRMPMLFDNYRDEDFYGLPQKYSIVARVEVKFSIEPRFRDRQHFVLSDINSASNLRIIPQYTSICSITTPIILDQFKKLWWRGTTVSLLLHFLKNKGVDRFYKFAKSNNWDYV

SEQ ID NO: 79734 - protein, 276 aa, Zea mays
  Coding DNA Sequence Number=SeqID_37955
MCYIYVKGYKVLMEPVVLNCERAATDQRKRMPVLFDDYRDEDFYGLPRKYSIVARVEVKFPIEPRFRDRQHFVLSDINGAKIEAITYMYETVKHFDNFLHEKHVYKMHNVKFSLHPGEFNFRHLNGPMELCLDQQTIVEPYTVPIQMAPFPKQIILNLADIAELPNRTLVDIMAIVVHLDTIHRTMWGPFRKIVIMDARGYLHIIKAWGDLLNKNALRWALAKEDYGIIIGTMFRGFRRQECLESSDHTAIHFNSFHHNTHHFGPIQKALVARNNR

SEQ ID NO: 79735 - protein, 104 aa, Zea mays
  Coding DNA Sequence Number=SeqID_37956
MARQPNSGGGPRTKTHNLTLSTIQRSPCPEEPARGLGDHSDRKNAKLQTQTRGKEGSRDDKLILCLVDEQGAGTTFKDELHAGAGGRWRALEAGAAAAGRGQKV

SEQ ID NO: 79736 - protein, 342 aa, Zea mays
  Coding DNA Sequence Number=SeqID_37957
  Gene Ontology: Mol. function=nucleic acid binding; Cellular component= intracellular; Biological process=ubiquitin cycle
  Homolog annotation: Hit_ID=Q1RZ04; Match level="QueryCoverage=78%, HitCoverage=44%, E-value=1e-102, Identity=67%"; Hit description=Zinc finger, RING-type; Zinc finger, RanBP2-type; Zinc finger, C6HC- type
MQNCRLQTRGKEGSRDDELILCLVDEQGAGTTFKDELHAGAGRRWRALEAGAAAAGRGQKVQERGAGTGEALGLCLGPWSEHGERTGGFYACNRYESARQEGVYDESERRREMAKNSLERYTHYYERWAANQSSRQKALGDLQSLQNDKLERLSDIQSQPESQLKFIIEAWLQIVECRRVLKWTYAYGFYLPEHEHAKRQFFEYLQGEAESGLERLHQCAEKELQIYLDAESPSKDFNDFRTKLAGLTSVTRNYFENLVRALETGLNDVGPSTSHGTCSKSATSKSLGGKSKSGKNRASSTSSKSGGSSRGVDDSNIWTCDQCTYANPKSARACQACDHQHR

SEQ ID NO: 79737 - protein, 161 aa, Zea mays
  Coding DNA Sequence Number=SeqID_37958
  Homolog annotation: Hit_ID=Q6QP51; Match level="QueryCoverage=98%, HitCoverage=86%, E-value=4e-11, Identity=31%"; Hit description =Putative growth-regulating factor 1
LAPRKGSTAASGHSGFAPTTDQGFEGWPPEGFDSRLRTRRARDDSGYVRYMTELGLRSRGTLGHFRDHQERFYNGIPSEGGIEPSDPIKRDRVRQITCRSKLRPLKGHDLASPEPSLGQEQQTQENSVACTAPTAVPPARVRLTAAKSSLGHHRKLRLARP

SEQ ID NO: 79738 - protein, 445 aa, Zea mays
  Coding DNA Sequence Number=SeqID_37959
  Homolog annotation: Hit_ID=Q6QP51; Match level="QueryCoverage=70%, HitCoverage=98%, E-value=8e-18, Identity=37%"; Hit description =Putative growth-regulating factor 1
  Subcellular localization annotation: CTP_CleavageSite=68; ConfidenceScore=5.08e-01
MQAACNRTTRMHPFDFDASCMESQAHTSCGRKQQSNRLQAHVPSWGSRGALSHGVKTTRPCSVPRTARATAAPRTTRPVALTPWQGRRHLWQAKRATLHLRHNDRIKKGTGKGDIPKGILLHEGSGPRALLLIRGSKAGPSEGFDSRLRALGLRAHYWSEVRRLAPRKGLTAALGHSGSVPTTDQGFEGWPPEGFDSRLRTRRARDDSRYVLYMAEARAMLSRKATKGRMIKAESVLDRPLALCKGSGAALANPAPAKPLTASTYQPENSEPNHAPGSKLRPLKGHDLASPEPSLRQEQPTQENSVACPAPTAVPPARVRLTAAKSSLRRHRKLRLARPQGSDSTSTLEDGLRLARPQGSDSTSTPGRRSPPHPTLGLGLNLDLGRRSPPRPTPGLGLSLDLGRRSLPHPTLGLGLSLDLGGVTASPDLGLGSTILQGDTSLPYP

SEQ ID NO: 79739 - protein, 93 aa, Zea mays
  Coding DNA Sequence Number=SeqID_37960
MAAFSVAEQYTLQSSRGLYVVCAIRATTSVVAGPIALGAFGFRRDLRTRAHGMKKHGNNTKDGAEPKLCARELRHDGRKEETDLKRKRLSRLR

SEQ ID NO: 79740 - protein, 139 aa, Zea mays
  Coding DNA Sequence Number=SeqID_37961
MDGGKEDDVDTVNARLSYRDCNIEMLIDMLTGGYDLAWKMDLPGRSHTSESKWDAEERLACGVEQGPDRGSRSAVSHPRRGINKPRGDCRYLRTRAHGMKKHGNNTKDGTEPKLCARELRHDGRKEETDLKRKRLSRPR

SEQ ID NO: 79741 - protein, 142 aa, Zea mays
  Coding DNA Sequence Number=SeqID_37962
MTNYKCTFGSKESKGTSVMQKRMPSQREQYGNTVHLFIGTGRSPCKITSKPFAFDNNSIVIYLGLDSLFLFKSVSSFLPSCRSSLAHSFGSAPSFVLFLCFFIPWALVRRSLSTHYTPEALLNHVFEDLRKSKAPNSSPSQY

SEQ ID NO: 79742 - protein, 373 aa, Zea mays
  Coding DNA Sequence Number=SeqID_37963
MTNYKCTFGSKESRGTSGTRKSLSTHYTLEALLNHVFEDLRKPKAPNIVVASKSKEDHLTDLAETFANMCDARLRLNPEKCVFKMTSHGSSEDGNALSHTDGLAREGFPRILWEVLQGAGYTTPPQYVMQQFEKHRVPRCRVRMTFEPHPLQPGWRSLDSESFGYRAEDTIEVIALHGLTTFCGFHPLELATHPIGLFPAEREDDPMWKDRVEHAKDIWAIYPGQTAHLTVRCMNALYRLQVMRGEATSHLMALLEATKITLDNREELVVDLSTEMVEKDLQVEQLSTDIQELEELVGTRENTIEVLEDQLINTQQQLVEANEHLDMHHQEIQDMEANEDVDIEGGEEPASSVDTAGSGRPPSPESSVASFAH

SEQ ID NO: 79743 - protein, 143 aa, Zea mays
  Coding DNA Sequence Number=SeqID_37964
MELRHRNRTWAENGQRINELAADVSRLQDELAERDLGVDWAINSRSVAWDREAKSRARVVEHSAALDNMQVYCNTLHEDVHVQYSRLHPDVPADPVGMGARPSGTAGEAFGGELDLFKPPPSMNLVDERSPTTDSEATKDDKY

SEQ ID NO: 79744 - protein, 143 aa, Zea mays; identical to SEQ ID NO: 79743
  Coding DNA Sequence Number=SeqID_37965

SEQ ID NO: 79745 - protein, 47 aa, Zea mays
  Coding DNA Sequence Number=SeqID_37966
MARGGDENVGFGIDSDDGKWYSFRLERILGLTEIPGTVVIVLTGSWL

SEQ ID NO: 79746 - protein, 321 aa, Zea mays
  Coding DNA Sequence Number=SeqID_37967
NSQLVESEGVAGGDENVGFGIDSDDGKWYSFRLERMARLRHTARKSVIPFLPSRLAERPLRRLVTGQSSHLERLHHCLHEEQERRRQEQEQQGSSFSLQQEELEGWVARPITRDAARGCHFHDALDTLLRRALDWRTWSIEYHCVVFQHSRGVYPDRWEATCLVRRPKNSLWGAEICSEHYSISERDSAEAAMQDAARRALSHYCSVLGGVADGLNLKYYPHHPSSSTGGVIVSPVGEDNPRLSSTVNLATVLNTELDHAVDELSRARAEIAQLRAERAERRHLDDGSPAPAGTQHPYRSPRHRHQSYGNLDCRTKINLEP

SEQ ID NO: 79747 - protein, 90 aa, Zea mays
  Coding DNA Sequence Number=SeqID_37968
MVWRERVLPCLVSAVTVVKHVLVRASYIGACSMIASENEEESEVTEEKTPPPPLESRARTWLYFNICKSEPDSPTNEGKPRCMQPLSLGF

SEQ ID NO: 79748 - protein, 90 aa, Zea mays; identical to SEQ ID NO: 79747
  Coding DNA Sequence Number=SeqID_37969

SEQ ID NO: 79749 - protein, 35 aa, Zea mays
  Coding DNA Sequence Number=SeqID_37970
MANLVVGNFSPSRSDAMNPLCAVAKLHPYLNAGTK

SEQ ID NO: 79750 - protein, 46 aa, Zea mays
  Coding DNA Sequence Number=SeqID_37971
MANLVAGNFSPSRSDAMNPSCAVAKLHPYLNADLIQRLRLKDTPSR

SEQ ID NO: 79751 - protein, 188 aa, Zea mays
  Coding DNA Sequence Number=SeqID_37972
  Gene Ontology: Mol. function=DNA-dependent ATPase activity; Cellular component=nucleus; Biological process=DNA replication initiation
  Homolog annotation: Hit_ID=Q6KAJ4; Match level="QueryCoverage=98%, HitCoverage=49%, E-value=4e-67, Identity=91%"; Hit description =Putative minichromosome maintenance deficient protein 5
MSGWDEGAVFYSDQAQFPRGGPGGDPAADLTRHSALRKFKEFLRGFTGPTGDFPYRESLVHNRDHVTVATEDLDAFDAELSDKIRKSPADYLPLFETAASEVLASLRSKVAGETGEMEEPVPGDVQIFLSSKENCLSMRSVGEMEFKEFAQRPDAYAKLCSMIGPSIYGHSDVKKAIACLLFGGSKKV

SEQ ID NO: 79752 - protein, 468 aa, Zea mays
  Coding DNA Sequence Number=SeqID_37973
  Gene Ontology: Mol. function=DNA-dependent ATPase activity; Cellular component=nucleus; Biological process=DNA replication initiation
  Homolog annotation: Hit_ID=Q6KAJ4; Match level="QueryCoverage=100%, HitCoverage=67%, E-value=0.0, Identity=89%"; Hit description =Putative minichromosome maintenance deficient protein 5
  Pfam annotation: Domain name=MCM; Domain location=313-468; Score =171.3; E_value=2.4e-48; Accession=PF00493.13; Description=MCM235 family
MSGWDEGAVFYSDQAQFPRGGPGGDPAADLTRHSALRKFKEFLRGFTGPTGDFPYRESLVHNRDHVTVATEDLDAFDAELSDKIRKSPADYLPLFETAASEVLASLRSKVAGETGEMEEPVPGDVQIFLSSKENCLSMRSVGADYMSKLVKIAGITIAASRVKAKATHVTLICKNCRSVRTVPCRPGLGGAIVPRSCDHVPQPGEEPCPLDPWIAVPDKSKYVDLQTLKLQENPEDVPTGELPRNMLLSVDRHLVQTIVPGTRLTVVGIYSVYQASTTQKGAVGVKQPYIRVVGLEQSRDNNSNGPSNFTLDEEMEFKEFAQRPDAYAKLCSMIGPSIYGHSDVKKAIACLLFGGSKKFLKFVEKTAPIAVYTSGKGSSAAGLTASVTRDSSSREFYLEGGAMVLADGGVVCIDEFDKMRPEDRVAIHEAMEQQTISIAKAGITTVLNSRTSVLAAANPIAGRYDDLK

SEQ ID NO: 79753 - protein, 85 aa, Zea mays
  Coding DNA Sequence Number=SeqID_37974
MVKNFGSRTVQIAMNVVSGPASEPKGPESHQGSCRGDLQPWCSGSVMSTGLKEFRRGPAHQRTMVNRLNTDGIKRCDHVSLAASL

SEQ ID NO: 79754 - protein, 148 aa, Zea mays
  Coding DNA Sequence Number=SeqID_37975
MEEFPAGIGDRVPIAISSSEEALDWALKVPVLPGGQRRAKSDTYVGLPAESPTVRVWRDSTARESARLFAEQWKGDLHAILAWPDPNFHGLLRLLRARQVGGAPVKLGSGSRQRLAPSALRIGAALRAEFCYSAYDPGEKIGRWRRWT

SEQ ID NO: 79755 - protein, 210 aa, Zea mays
  Coding DNA Sequence Number=SeqID_37976
  Subcellular localization annotation: CTP_CleavageSite=7; ConfidenceScore=5.05e-01
MGCLPPSIAERSRSRTSGGCPQRWRPSPVPPSNRAPELHFPLWFVLRRADQQANQRVQNLTRDHAEETFNHGAAAREEALDWALKVPVLPGSQRRAKSDTYVGLPAESPTVRVWRDSAARESARLFAEQWKGDLHAILAWPDPNFHGLLRLLRARQCLRSWRKDREVEKMDLTGGSRPEAAVRARPCGCEDDCHGPPVIGREHEAHGGLV

SEQ ID NO: 79756 - protein, 147 aa, Zea mays
  Coding DNA Sequence Number=SeqID_37977
MLHSDDDGTLASSEEALDWALKVPVLPGSQRRAKSDTYVGLPAESPTVRVWRDSAARESARLFAEQWKGDLHAILAWPDPNFHGLLRLLRARQCLRSWRKDREVEKMDLTGGSRPEAAVRARPCGCEDDCHGPPVIGREHEAHGGLV

SEQ ID NO: 79757 - protein, 166 aa, Zea mays
  Coding DNA Sequence Number=SeqID_37978
MCKKARPKGYRVTRAVQIRSSGEDWIWRVMYCEEALDWALKVPVLPGSQRRAKSDTYVGLPAESPTVRVWRDSAARESARLFAEQWKGDLHAILAWPDPNFHGLLRLLRARQCLRSWRKDREVEKMDLTGGSRPEAAVRARPCGCEDDCHGPPVIGREHEAHGGLV

SEQ ID NO: 79758 - protein, 240 aa, Zea mays
  Coding DNA Sequence Number=SeqID_37979
  Homolog annotation: Hit_ID=Q10MT6; Match level="QueryCoverage=95%, HitCoverage=44%, E-value=4e-12, Identity=27%"; Hit description =Expressed protein
  Pfam annotation: Domain name=TFIIS; Domain location=48-129; Score= -9.8; E_value=0.067; Accession=PF08711.1; Description=Transcription factor S-II (TFIIS)
MSLRRWKPFFPAFAAIDTAIETATGARSRDKFRQLRSELVEMLCDAADDDADRVKGLCRLLDAAMAEALSTLHVVPVTTTMLTTTGVDKAVEGLLSHEAGKVRALAHGILIQWAEGGVLDTTVLAAPSTHRMHPQAQRPETAVLLAYTPKISDEKMPPVVSNAGGDRVRSGQTGDAKRKHPGYYREADADDEKRQRNVPEKVEDRPRKMEPDIKSRSSWRSRDTKSRSRASSWRYRDERR

SEQ ID NO: 79759 - protein, 240 aa, Zea mays
  Coding DNA Sequence Number=SeqID_37980
  Homolog annotation: Hit_ID=Q10MT6; Match level="QueryCoverage=95%, HitCoverage=44%, E-value=3e-12, Identity=27%"; Hit description =Expressed protein
  Pfam annotation: Domain name=TFIIS; Domain location=48-129; Score= -9.8; E_value=0.067; Accession=PF08711.1; Description=Transcription factor S-II (TFIIS)
MSLRRWKPFFPAFAAIDTAIETATGARSRDKFRQLRSELVEMLCDAADDDADRVKGLCRLLDAAMAEALSTLHVVPVTTTMLTTTGVDKAVEGLLSHEAGKVRALAHGILIQWAEGGVLDTTVLAAPSTHRMHPQAQRPETAVLLAYTPKISDEKMPPVVSNAGGDRVRSGQTGDAKRKHPGYYREANADDEKRQRNVPEKVEERPRKMEPDIKSRSSWRSRDTKSRSRASSWRYRDERR

SEQ ID NO: 79760 - protein, 97 aa, Zea mays
  Coding DNA Sequence Number=SeqID_37981
  Subcellular localization annotation: CTP_CleavageSite=56; ConfidenceScore=5.40e-01
MCSRPPPLLFPLGRRPPAHLLLSQFLHPPNPSRPPSQSPPPKVPILAARIIVVVVRVFNRFGGGKKGGRKGGESKVVDFQIVLRDLPELPVLDTCWE

SEQ ID NO: 79761 - protein, 80 aa, Zea mays
  Coding DNA Sequence Number=SeqID_37982
MVHPPRLVPRRVGASLPLEFGGRKKEEWKEERRNPRFFRWVKTRLLAVSLIFVGGNLPVVDFRIVLRDLPELPVLDTCWE

SEQ ID NO: 79762 - protein, 290 aa, Zea mays
  Coding DNA Sequence Number=SeqID_37983
MPQNPIREMLHDVEGREDVMGATIPVIKPRRSPSTMHSGPAAEYPDTMRRRTTPGPPQRQSGHSVEARPCPNLRRHGEDRYPRCACSPAARLKFNGGGDMSSAVAPFSHPISFSCWLRRSTDGKVVMGHGFILTTKGGGSATPKVAEIHAGNDSAQASVGCYRLNDRRRKGMIEAVHRGPPSGDMLREEARQATDQRAPHVGTTANAGVQRVNGPSGRVVLRVGRSQVGSRPDKLVTLAVRAHKTSRDANTVTCQFATSFRVPARIVPVSYAEFSDTYRLLVIPYPTDIR

SEQ ID NO: 79763 - protein, 262 aa, Zea mays
  Coding DNA Sequence Number=SeqID_37984
MHSGPAAEYPDTMRRRTTPGPPQRQSGHGVEARPCPNLRRHGEDRYPRCACSPAARLKFNGGGDMSSAVAPFSHPISFSCWLRRSTDGKVVMGHGFILTTKGGGSATPKVAEIHAGNDSAQASVGCYRLNDRRRKGMIEAVHRGPPGGDMLREEARQATNQRAPHVGTTANAGVQRFNGPSGRVVLRVGRSQEVVPFTHKSCYPSAKGSRLPIHLYRGGEAGTAIAAKSSRGPPYTDHSPTALAPFGRGPGAKDPKTQNTMQ

SEQ ID NO: 79764 - protein, 159 aa, Zea mays
  Coding DNA Sequence Number=SeqID_37985
MATILCNGTVSLDCPWPSLSRSTVHGLLPYFDHKGGGALVPHGGGPAGDSRAGAQMPQSPLLRVLREAQNIGNREGWFSPTTEVRSMLSTEDGGNTTGMVLRRAIHWTLKATAAKHMPDHHPRAPAILPDPTMDTEWRQRCRTMVVALSRSPRWRWASP

SEQ ID NO: 79765 - protein, 171 aa, Zea mays
  Coding DNA Sequence Number=SeqID_37986
MATILCNGTVSLDCPWPSLSRSTVHGLLPYFDHKGGGALVPHGGGPAGDSRAGAQMPQSPLLRVLREAQNIGNREGWFSPTTEVRSMLSTEDGGNTTGMVLRRAIHWTLKATAAKHMPDHHPRAPAILPDPTMDTEWRQRCRTMVVALSRSPGGGGESIDTEHLEDWLKGG

SEQ ID NO: 79766 - protein, 92 aa, Zea mays
  Coding DNA Sequence Number=SeqID_37987
MAMGRVRIGYDKYPPATIPAGITHTRPRLYPRAAGRDQGRSLAPRIGGTLTQDSWRPADDREPGTLTQEQDWSLAGMSFMTFVCLRLRIIVS

SEQ ID NO: 79767 - protein, 188 aa, Zea mays
  Coding DNA Sequence Number=SeqID_37988
HRTVSGVTPDCPVCQRSNSYFAPTVDCKRIQCATVRARVRAAADGAPDSLQDLSGAPPDSPEAPPVGMAMGRVRIGYGKYPPATIPAGITHTRPRLYPRVGFCTRARTHRVSGGYRISAGIITLHGKPGTPDAGPASTVLGGLGTAALAWSLDLAPRLLAGRLRWRSGAWGRDRVRSRTAKRTAEFCE

SEQ ID NO: 79768 - protein, 158 aa, Zea mays
  Coding DNA Sequence Number=SeqID_37989
  Homolog annotation: Hit_ID=Q6QP51; Match level="QueryCoverage=66%, HitCoverage=53%, E-value=3e-10, Identity=50%"; Hit description =Putative growth-regulating factor 1
MTGKQRRPPRSDCHANHPGEADNKSQSTTEFDLGRDRKLRLARPQAPASGGGLRLARPPDSASTSASGGIASSPDPGLGFKRSLHLARPWARTNWGYIITLSLASSGYKEQDRRPIWLTPATGNDGAPRATMTPVALSPLRQQGDVSRIPAALPAVLL

SEQ ID NO: 79769 - protein, 158 aa, Zea mays; identical to SEQ ID NO: 79768
  Coding DNA Sequence Number=SeqID_37990
  Homolog annotation: Hit_ID=Q6QP51; Match level="QueryCoverage=31%, HitCoverage=20%, E-value=3e-10, Identity=66%"; Hit description =Putative growth-regulating factor 1

SEQ ID NO: 79770 - protein, 337 aa, Zea mays
  Coding DNA Sequence Number=SeqID_37991
MDESGMKKEIRLLQPHSDDMSRVVDQLLKLFATFVGGGVHRHRLALAVVEGARPRGDRRPSPIARLQGFSSCSPAAFPHQWSVWWGEASRAAASAPPSASRIFVILAEAEGKLSWGSTSRMGRQAVFSFSIQGRGRSPALRRGRTSTTRDRLAASVVSSSVPGSLAQLAVPQASDAASCRLIRARPSVHRAGDLLRRAHRGIVQDAVRRMGGVRVLGLSCPHSSTTPPRGGRGPPVREDLSGDLPVQAGASAIRLCGAGAQVATVVGAEVVAAREGFSADETIGAICGRTPGSLALMACPRPSSGDVGEGLITAASALRSSLLLFSRSKRGSSSLLV

SEQ ID NO: 79771 - protein, 325 aa, Zea mays
  Coding DNA Sequence Number=SeqID_37992
MDESGMKKEIRLLQPHSDDMSRVVDQLLKLFATFVGGGVHRHRLALAVVEGARPRGDRRPSPIARLQGFSSCSPAAFPHQWSVWWGEASRAAASAPPSASRIFVILAEAEGKLSWGSTSRMGRQAVFSFSIQGRGRSPALRRGRTSTTRDRLAASVVSSSVPGSLAQLAVPQASDAASCRLIRARPSVHRAGDLLRRAHRGIVQDAVRRMGGVRVLGLSCPHSSTTPPRGGRGPPVREDLSGDLPVQAGASAIRLCGAGAQVATVVGAEVVAAREGFSADETIGAICGRTPGSLALMACPRPSSGDVGEGLITAASALKVIAAAI

SEQ ID NO: 79772 - protein, 85 aa, Zea mays
  Coding DNA Sequence Number=SeqID_37993
  Gene Ontology: Mol. function=phenylalanine ammonia-lyase activity; Biological process=histidine metabolic process
  Homolog annotation: Hit_ID=Q7M1Q5; Match level="QueryCoverage=53%, HitCoverage=6%, E-value=5e-14, Identity=84%"; Hit description =Phenylalanine ammonia-lyase
  Subcellular localization annotation: CTP_CleavageSite=22; ConfidenceScore=5.49e-01
MLSVPFIMLFMIQSLLALTRLRADSSSSTRASPAPVATAATCAMLRLGALDLHQGTVSTTVAKWFVPIARGTMDKVYRFGPLRDA

SEQ ID NO: 79773 - protein, 215 aa, Zea mays
  Coding DNA Sequence Number=SeqID_37994
  Homolog annotation: Hit_ID=P53443; Match level="QueryCoverage=27%, HitCoverage=8%, E-value=3e-15, Identity=79%"; Hit description =Phenylalanine ammonia-lyase
MSSDVNGEFVMDTKSVLPVMPVFDFWIQVVEVPNVSWEDIGGLENVKRELQEGTAPGAGGRPGSRAHGAPLGGLVLVSKDPDNIPEIAAIYMAEYRQPLVKIEGASLSIAQVAAVATGAGEARVELDESARSRVKASSDWVMNNMMNDTDSMMRGGAAGGIRVRLLRLLRSQTSSTSISRVFAAAAHGCHSGPRQCRPSSSPRRRHPIAAPGSQR

SEQ ID NO: 79774 - protein, 95 aa, Zea mays
  Coding DNA Sequence Number=SeqID_37995
MAWAGAKHSRRGGCFSRWLQLRQLCRSTVRSAPEMESLATDDVVALSPRAIGFEEMVDSSAVGDVGEELWFDEEGDAALRATTDECEAHHGCDPR

SEQ ID NO: 79775 - protein, 402 aa, Zea mays
  Coding DNA Sequence Number=SeqID_37996
  Pfam annotation: Domain name=Extensin_2; Domain location=4-310; Score= -140.7; E_value=0.084; Accession=PF04554.4; Description=Extensin-like region
MTRRTQRRALIGSYGLASDCPHQRHQIEPDRKEGVRPDAAPPSTTPPISRASHARSIPATSPAWSKPGDLHSLVPPPATTARSRALPLTQSRRTPSPSPIFQPPPHAAICASFIAKVSVALEDGSTPKPLAPVVPPLPPHDSRSWPTTEIAAENPLTRPFAAVLSKTRSPSSPLPSSPVPRPRFQIYARCGRVVASSAWPRASSSSPTPLEHRCHHRGSQSWWASHSSVVALNAASPSSSNHSSSPTSPAADESTISSNLMALGDSATTSSVAKLSISGADLTVLLHSCLSCNQRLKQPPLRPCFAPAHAIGRSLGLHRHRCHDDPSCPRALLVVLFPTLLTCDAHFTGLPTMSSDVNGEFVMDTKSVLSVMPVFDFWIQVVEVPNVSWEDIGGLENVKREL

SEQ ID NO: 79776 - protein, 133 aa, Zea mays
  Coding DNA Sequence Number=SeqID_37997
MAPSRGGRCPTRPGGLEWGSAGGLVGPAVGAEAEAAREVPIADGITATIRASGLRAGGGEPLVSLLLLRRPTPMEWGCSYLRRREPEFRFVMALRMPEFLGSIGLAVRGSSSSVKGTPRPLFDEPRPGVAISV

SEQ ID NO: 79777 - protein, 280 aa, Zea mays
  Coding DNA Sequence Number=SeqID_37998
  Subcellular localization annotation: CTP_CleavageSite=51; ConfidenceScore=5.18e-01
MSSSSLMRRIFPPSKPPDGGCLPSFCLIIGGTQLRGSWYLSAIVQLQGFSSASPAAPPRRRSPEMVTTSSWVGRSKPGCDLGPTLSFKDVYHPRWGGGRAEPALCLPRGSVGHPLPRHSRERALTGPAGGPNSDNAGLVDGRRRHLQRVGFVGLAPGGPFCRRAAAAPCRCLTRPGGLEWGSARGLVGPAVGAEAEAAREVPVADGITATIRASGLRPTPMEWGCSYLRRRELEFRFVMALRMPEFLGSVGLAVRGSSSSVKGTPRPLFDEPRPGVAISV

SEQ ID NO: 79778 - protein, 336 aa, Zea mays
  Coding DNA Sequence Number=SeqID_37999
  Homolog annotation: Hit_ID=Q6QP51; Match level="QueryCoverage=15%, HitCoverage=30%, E-value=4e-14, Identity=78%"; Hit description =Putative growth-regulating factor 1
  Subcellular localization annotation: CTP_CleavageSite=33; ConfidenceScore=5.77e-01
MSSSSSSSSSSSSSGVSGDGSLGSPSLSCLQRRLSKASRARICSRAPSLFRVLLLLLLCSDPPHGSVHRVLRDRWQGRLVTPQLLETDGNPDCENQGQSDTRKKERTLTRDIHPRSGHIKGWVRAPASSLPTVPATRVRRSSAERGTEDICEPSKSTPGIISESGNHRSIKGSTLRRWMAATILAAETKLSTPRRRGRAGPARRDHPLRLWVTREGTEQAIGDKGLQIVPHDGGERSRVARRNDGYPVGHRQAKGVAAEQTRDQERGYSERDPSPRRKRAPSPPTDQGFEGWPLGRVRQPPQSTQASGSILIRGSKAGPSEGFDSCLRPLRLRAHY

SEQ ID NO: 79779 - protein, 125 aa, Zea mays
  Coding DNA Sequence Number=SeqID_38000
MAPEAGLSCCQPHSVEWHSSRSRAGGAVVLSGRSVERRSDCGHFGSVDLKSVRQDKVLVDPCIKCSCDTVGWRGDLAKVASPRSLPELGLGRVEGRETPSCGDSSQTGNSERKKHRGIQVDLWIT

SEQ ID NO: 79780 - protein, 159 aa, Zea mays
  Coding DNA Sequence Number=SeqID_38001
  Subcellular localization annotation: CTP_CleavageSite=49; ConfidenceScore=5.17e-01
MTRGRANGLKGHRTVRCAPDSVRCANGSKSPTVGCAKTGKKSAPDCPVRQSTEGKNCLPGMLSTAPSCLGAIKGTPRRMEEDTKHTLSILDHSHFVLAHSFDILSDLSSVLDERLQVVEIPRKRDIVKGKEIPWYSSGSLDHLRGVDCNPRPLGRHNVE

SEQ ID NO: 79781 - protein, 359 aa, Zea mays
  Coding DNA Sequence Number=SeqID_38002
  Homolog annotation: Hit_ID=Q6QP51; Match level="QueryCoverage=58%, HitCoverage=99%, E-value=6e-14, Identity=36%"; Hit description =Putative growth-regulating factor 1
MNAVVTSHILVCLYSAAVDRKDQTVTLQGGTDTSSGIESFLGNELREGAVQAKASSTQGTRPRPSPASGWSSSPRRVHASPEGLLRQRAPPRLSRSPARASFVVKQPWPDRLTNRPLRRRIQCRGRLTPYPDTRASVGQAEVKTDNKSRSTTEFGLGRNRKLHLARPQAPASGGGLRLARPPNSVSTLVSGGIASSLDPGLSLKRSLRLARPWARTDRANRGYIITLSLASSGYKEQDRRPIWLTAATGNDGAPRATMTPVALSPLRQQGDVSRILAALPAVLLQGSGASPTATLSRVQGSSSPSTATLPSEHPTAARAERGGAIAVNIDPAFDYPAANATSLELKVRKRRTRRRIPYQ

SEQ ID NO: 79782 - protein, 148 aa, Zea mays
  Coding DNA Sequence Number=SeqID_38003
  Homolog annotation: Hit_ID=Q6QP51; Match level="QueryCoverage=47%, HitCoverage=39%, E-value=3e-12, Identity=64%"; Hit description =Putative growth-regulating factor 1
MPKPCVHGNVAVEGELEPCTRDSVAVGEAPEPCRSTAGSAARILLTSPCCRKGLRATGVMVARGAPSLPVAAGNDVSPVGAVGPSPRSGEAETSLKAEARVERGRDSSRDQGRDRVRGSGEAETSSRGRSLRSGEVELPVAPKAELSG

SEQ ID NO: 79783 - protein, 316 aa, Zea mays
  Coding DNA Sequence Number=SeqID_38004
  Homolog annotation: Hit_ID=Q6QP51; Match level="QueryCoverage=61%, HitCoverage=98%, E-value=9e-49, Identity=48%"; Hit description =Putative growth-regulating factor 1
MSRLLDCGTSTATRGSPTHDPTVPIECNDHGLAPRKGSTAALEHSGSKPITDQGFEGWPLGRVRQPPQSTRAPRPLLIRGSKAGPSEGFDSRPRARRVRDDSRYVYYMAEARATLPSHFALSLTDLTGKQRCSPRSDCRATHYGETDNSRVQPRVQQEAPPRPTLGLGLGEEVSASPDPRARPQPQPQEESRPRLTPASASGEVSASPDLGLGPTAPQGIHHYPTLASLGYEGTRPASHLARPDNRHFSDGHVIAYTGLKHLSDSHVGMYTGLRHSSARHPNVGFNPGKNFTCSSGRLKPTRVSFSENSGGKSYRV

SEQ ID NO: 79784 - protein, 87 aa, Zea mays
  Coding DNA Sequence Number=SeqID_38005
  Homolog annotation: Hit_ID=Q5Z5B2; Match level="QueryCoverage=60%, HitCoverage=5%, E-value=1e-15, Identity=65%"; Hit description =Putative AGO1 homologous protein
MVNHNSYHEDPYSKEFGINITFYILLMMKLKYNKTGRENDCLPRVGHWNMMDKGPTRRDAAALDPELLQLVELAPGALCENSIADVL

SEQ ID NO: 79785 - protein, 153 aa, Zea mays
  Coding DNA Sequence Number=SeqID_38006
  Homolog annotation: Hit_ID=Q7XDE0; Match level="QueryCoverage=34%, HitCoverage=9%, E-value=7e-12, Identity=66%"; Hit description=EF hand family protein, expressed
MGEGWLSLLKWLPPPKLSEPNVGFNPGKNFTCSSVFYILLMMKLKYNKTGRENDCLPRVGHWNMMDKGPTRRDAAALDPELLQLVELAPGVLRENSIADVLYSQWLVLPETTKLLGSTAIGLKTKDGVVLAIEKRVTSPLLVLSHFLSGHSVK

SEQ ID NO: 79786 - protein, 200 aa, Zea mays
  Coding DNA Sequence Number=SeqID_38007
  Homolog annotation: Hit_ID=Q7XDE0; Match level="QueryCoverage=26%, HitCoverage=9%, E-value=1e-11, Identity=66%"; Hit description=EF hand family protein, expressed
MGEGWLSLLKWLPPPKLSEPNVGFNPGKNFTCSSVFYILLMMKLKYNKTGRENDCLPRVGHWNMMDKGPTRRDAAALDPELLQLVELAPGVLRENSIADVLYSQWLVLPETTKLLGSTAIGLKTKDGVVLAIEKRVTSPLLEMCGFDEEAKSYKDPSAIELVLMPWRYSTGYVLFVLIMQTNLCLCLISHLLQNGAKIYH

SEQ ID NO: 79787 - protein, 77 aa, Zea mays
  Coding DNA Sequence Number=SeqID_38008
MSTGSSYAMETLYRLCTFRINHANKFVSVFNFTPTLEWCKDIPLKSLNTGHFALHIMEWWDSGLRAQLSMVRIIAYM

SEQ ID NO: 79788 - protein, 73 aa, Zea mays
  Coding DNA Sequence Number=SeqID_38009
MAGIAACGLWVRDWDWEVVLRVRGFVRELLDSLDFLLDQWRGRERRGDSPERGTMTVLRDLHTGEGRRGVAEA

SEQ ID NO: 79789 - protein, 115 aa, Zea mays
  Coding DNA Sequence Number=SeqID_38010
MARANRPSGRRKPAAEGVGRGLPVGRWRSSAAGIAAGGLWVRDWDWEVVLRVCGFVRELLDSLDFLLDQRRGRERRGDSPERGTMTVLRDLRTGEGRRGVVEAGAGKKVPGRPFL

SEQ ID NO: 79790 - protein, 189 aa, Zea mays
  Coding DNA Sequence Number=SeqID_38011
  Homolog annotation: Hit_ID=Q10MR3; Match level="QueryCoverage=46%, HitCoverage=49%, E-value=5e-20, Identity=60%"; Hit description =Expressed protein
  Subcellular localization annotation: CTP_CleavageSite=49; ConfidenceScore=5.68e-01
MSPARASLSASWNHRLVQSDTTSASGTLSSASSPHAAAKSRTSARPELAAAAAAADFLGVSSGADGVLSALPADAAVSDGTRRLRAYERTAAAAAAVAAAGIGPFEGLDHASPEPSLGQGQPTPEDLRLARGPPPAANSRSDRHHFVAPLTGLTERQRCLRRSDCGLGLGLSPGRRRTPLRPTQGSDSG

SEQ ID NO: 79791 - protein, 241 aa, Zea mays
  Coding DNA Sequence Number=SeqID_38012
  Homolog annotation: Hit_ID=Q10MR0; Match level="QueryCoverage=29%, HitCoverage=30%, E-value=8e-21, Identity=74%"; Hit description=RNA recognition motif family protein, expressed
  Subcellular localization annotation: CTP_CleavageSite=77; ConfidenceScore=5.42e-01
MAAAPSPSVPACSDLLAAVSAFVDAFVDFAVSDIFFPTFPSSSLLPPRPKTPTTFLPSPSWLVAIGDLHGDLPKSLSALRLAGLTHGGAFLPILGNHEVMNISGDFRFVMLQGFHDRADGVIWIDEANSFQERRMHGPGAGRCFGNGDCPILRALFVSATPMSDAAEEVEEMLSGDIPPSQTIYLNNLNEKVKKEELKRSLYALCSQYGRILDVVALKTQKLRGQAWVAFSEITAATNAFR

SEQ ID NO: 79792 - protein, 242 aa, Zea mays
  Coding DNA Sequence Number=SeqID_38013
MATSQDGEGRKVVGVFGRGGSKEEDGKVGKKMSDTAKSTNASTNADTAAKRSLQAGTEGDGAAAIFLYLCSGRDSPSRDMVDARASIGAEDPTTVDVVVTQLMPEEALQLCTGCVHLYTFLHRLSLCRKLLSGTVFLYKQYPLSMARRGFVLISKIVKTVNIIDAKIRDRMLRRAGAAGIAASAQGEESRGGEIAAMSGGGVILVLPAGRFMGPQGSWANLIRGASLSLGVVQQKSTAMAAM

SEQ ID NO: 79793 - protein, 135 aa, Zea mays
  Coding DNA Sequence Number=SeqID_38014
MALSAAACLAPRPGLIWCRLRRCHPPLGRSVAARPPHGRWSRRAWVGHIHGFSRATGHTGRSYKTSYAVGAAVAFLDGLVLTPAVRTGARTSSWVLGQPLPIGAEVVAATDGAVVVASAGEAARYRGGCLRWQDR

SEQ ID NO: 79794 - protein, 135 aa, Zea mays
  Coding DNA Sequence Number=SeqID_38015
MALSAAACLAPRPGWIWCRLRRCHPPLGRSVAARPPHGRWSRRAWVGHIHGFSRATGHTGRSYKTSYAVGAAVAFLDGLVLTPAVRTGARTSSWVLGQPLPIGAEVVAATDGAVVVASAGEAARYRGGCLRWQDR

SEQ ID NO: 79795 - protein, 272 aa, Zea mays
  Coding DNA Sequence Number=SeqID_38016
TVTGGFGFGMKVLFLVKMVRTIQTTRMNTNYIPPPRKVPVYPVVVEEIPVDLSHIWVENGVILEDISEEFLPTPTPLAESLAFTAGSSASAPLAPAVQAPAPGGDDPDDSSDDDKTTRKKKKMRKTSMRKPTKNSRTTTWDYGLSLNITPQCDRGFRTLSTHESLTPLSTYAASFSDAARRTLWSLSHTYRQQLHNTKYRHLPLRLNSNLDSATLDLSRVHLDLEDAHARIATLEAQLDGRNPLEVQVPAMALSPPRKRIRYGEPGSITRLL

SEQ ID NO: 79796 - protein, 257 aa, Zea mays
  Coding DNA Sequence Number=SeqID_38017
MKMVRTIQTTRMNTNYIPPPRKVPVYPVVVEEIPVDLSHIWVENGVILEDISEEFLPTPTPLAESLAFTAGSSASAPLAPAVQAPAPGGDDPDDSSDDDKTTRKKKKMRKTSMRKPTKNSRTTTWDYGLSLNITPQCDRGFRTLSTHESLTPLSTYAASFSDAARRTLWSLSHTYRQQLHNTKYRHLPLRLNSNLDSATLDLSRVHLDLEDAHARIATLEAQLDGRNPLEVQVPAMALSPPRKRIRYGEPGSITRLL

SEQ ID NO: 79797 - protein, 111 aa, Zea mays
  Coding DNA Sequence Number=SeqID_38018
LVCLADVMNMHQPCFLQYLLLILVPLLLSASSYDRSGEFTFDGFSGNDLITMDVAASVTNGLLSLTSGQKELRGHLAEREVGCVSLADCGAEARGARAASGEAHCNTPGVT

SEQ ID NO: 79798 - protein, 265 aa, Zea mays
  Coding DNA Sequence Number=SeqID_38019
  Gene Ontology: Mol. function=thiosulfate sulfurtransferase activity; Biological process=sulfate transport
  Homolog annotation: Hit_ID=Q9ZPK0; Match level="QueryCoverage=45%, HitCoverage=30%, E-value=2e-09, Identity=37%"; Hit description =Thiosulfate sulfurtransferase
MKFWIGLSATVKWTGLPPAHPGLVLVEPKARVLVAGGGIGGLAFALAARRKGFEVLVLERDLSTVRGEGRYRSPIQLQSNALAALEARVRLPARCPRASGFCTAVGQGDTTDLPLRQVAYDAHASLGNPWPLQADHARMSGFWLISKRISLQEVPSDSQTAFEFVFIDGAKRLEGKRPDIFVVNYFGSGFQTFSATVSALGIYNKDGIVVYDGKGLFSAARVWWVKNVGTHVLNVKNVGTVEVIVQSSQTHAGHISSTATWPHRT

SEQ ID NO: 79799 - protein, 733 aa, Zea mays
  Coding DNA Sequence Number=SeqID_38020
  Gene Ontology: Mol. function=transcription regulator activity; Cellular component=nucleus; Biological process=regulation of transcription
  Homolog annotation: Hit_ID=Q5DM34; Match level="QueryCoverage=38%, HitCoverage=99%, E-value=1e-131, Identity=82%"; Hit description=BHLH transcription factor
  Pfam annotation: Domain name=HLH; Domain location=576-625; Score =48.6; E_value=2e-11; Accession=PF00010.16; Description=Helix-loop -helix DNA-binding domain
MNGGSKRRGVNSEEAKPSGWTAAAPQQQHQQRHGPEVGSSPHTRNPLAHHTKSSSHLPTPPPALCSPDLRTRPETQKEREIRAPPAPISAPPLPAAAGFRALLLDPTAGPSLCSVPFRVVGIMVMKMEHEDNGAIGGTDGTWTEDDRALGAAVLGADAFAYLTKGGGAISEGLVATSLPGDLQNKLQELVESESPGTSWNYAIFWQLSRTKSGDLVLGWGDGCCREPRDGELGAAASAGSEDSKQRMRKRALQRLHIAFGVADEEDYSPGIDQVTDTEMFFLASMYFAFPRHAGGPGQAFAAGIPIWVPNSERKVVPANYCYRGFLANAAGFRTIVLVPFESGVLELGSTQHIAESSGTVQTVRSVFAGTSGNKSAVQRHEAERSPGLAKIFGKDLNLGRPSVGLAVGVSNSKVDERTWEQRSAVGGTSLLPSVQKGLQNFSWSQARGLNSHQQKFGNGVLIVSNNEGAHRNNGAVDSPSAAQFQLQKAPQLQKLSVVQKTPQLVNQQPMQAQVPRQIDFSAGSSSKPGVLVTRAGVLDGESAEVDGLCKEEGPPPVMEDRRPRKRGRKPANGREEPLNHVEAERQRREKLNQRFYALRAVVPNISKMDKASLLGDAITYITDLQKKLKEMETERERLLESGMVDPRERAPRPEVDIQVVQDEVLVRVMSPMENHPVKKVFQAFEEAEVRVGESKVTSNNNGTAVHSFIIKCPGTEQQTREKVIAAMSRAMSS

SEQ ID NO: 79800 - protein, 243 aa, Zea mays
  Coding DNA Sequence Number=SeqID_38021
AIVEGLGNIALLASSSPDSWDYLTTHGTATRLCLERAGEVEIELGMTGKNDELEKLHAISARRYELGEEVERAQGSRPDAAVGAAMAARRDHPGENWSRGARGSNLDWAPWASSGDPTGATIGAGTGARLELGDGLGQGEATSAQGSSRKIHGACAGTSRRSTVLGFGKVEQRERKLSACREGAESREVRRGGGERSATLGAGASASREKKAGRAADRSGHGRKGEERARTELSSTGRGWEGE

SEQ ID NO: 79801 - protein, 176 aa, Zea mays
  Coding DNA Sequence Number=SeqID_38022
MSRARSARELYGGVGSSRCQSARRDPGENWSRGARGSNLDWAPWASSGDPTGATIRAGTGARLELGDGLGQGEATSAQGSSRKIRGACAGTSRRSTVLGFGKVEQRERKLPACREGAESREVRRGGGERSATLGAGASASREKKAGRAADRSGHGRKGEERARTELSSTGRGWEGE

SEQ ID NO: 79802 - protein, 99 aa, Zea mays
  Coding DNA Sequence Number=SeqID_38023
  Subcellular localization annotation: CTP_CleavageSite=53; ConfidenceScore=5.78e-01
MESSPVLAVSPIPLPPPSAYKRTRSSPVFATQLQPSPLPSSPSHSSKRRRAPCLAPLWPKLRHTLTITGHHFAFPIVAGNPTGGFAAAGTRHCAVDRPP

SEQ ID NO: 79803 - protein, 99 aa, Zea mays
  Coding DNA Sequence Number=SeqID_38024
  Subcellular localization annotation: CTP_CleavageSite=44; ConfidenceScore=5.87e-01
MASSPVLAVSPIPLPPPSAYKRTRSSPVFATQLQPSPLPSSPSRSSKRRRAPCLAPLWPKLRHTLTITGHHFAFPIVAGNPTGGFAAAGTRHCAVDWPP

SEQ ID NO: 79804 - protein, 143 aa, Zea mays
  Coding DNA Sequence Number=SeqID_38025
MGKPVPSLLMLLLSRGGVPLDSPTRWQDGWPSHSSNHVLQGTCKIYATSKAEYTNTQLDLPGYNGSSSLISCEKQTIRIEFLSLQVTALVPTITGMGDHVSGRVRRAICGQYVQTLDTGIRTLILIPFSHLVDNQSPWIVVYH

SEQ ID NO: 79805 - protein, 129 aa, Zea mays
  Coding DNA Sequence Number=SeqID_38026
MATDRIKYHNLTRCFCKSNHHCSKCSGNKLMGHSVPTHINRPHRFPGNRKGLTALAYNASLTPTGRRAVTALVPTITGMGDLVSGRVRRAICGQYVQTLDTGIRTLILIPFFPSRRQPIPMDCCPQLES

SEQ ID NO: 79806 - protein, 1173 aa, Zea mays
  Coding DNA Sequence Number=SeqID_38027
  Homolog annotation: Hit_ID=Q01G91; Match level="QueryCoverage=21%, HitCoverage=15%, E-value=3e-25, Identity=30%"; Hit description=[UD] KOG1860 Nuclear protein export factor
  Pfam annotation: Domain name=SAC3_GANP; Domain location=8-194; Score=- 26.0; E_value=0.035; Accession=PF03399.6; Description=SAC3GANP family
MNLFCGHPYFLECFILKLSFVEQIRLHIIAMHELCEYNKGEGFSEGFDAHLNIEQMNKTSVELFQMYDDHRREGVLFSTEKEFRGYYALLKLDKHPGYKVEPAELSLDLAKMSREIRGSPEILFAREVARACRMGNFISFFRLARKATYLQACLMHAHFAKAAVQFQVHLFFCKLTSEVSSQLRRQALASLHSGLQNGQGIPISQVVVWLAMEDEDVENLLEYHGFGLRQYEELYLVKEGPFLNSESDFPSGCSQLVHSKKSQRVVDDVSSGPDCAPTSKEKTVFPYTGQPVAGKRDLFLPQNAPAIPPDGRMDLDPSFPGPISITPDRQISPLFSDPFSPRAASKLFSSTHPKPLSPTDGRKDRFSSVLTAVSPRTGKRDILSKTPKVASPKAEGKTKLVNGLIAEDQDSGVAEIPQKVEMQTDILWSQANTQNANALAEPIISHPLADSMSLNYSSMYGAEDDFRAHVSGIGADMDEGTPPDHECLVIGAGLPISSPLSYHEEYEDHSISNGTNDDWLPIVMPAKKLISDENLKAILRKWRQHAADKRLLREQKNALAVAALCSLSLGPPVHKSTTVSKLAVEELDIGHAFKERQARKQRSWSRLNVSELSGPILNENNPDARCLCWKLLVLVPPGMESQTNSFVSKWLLRKLMGYGIGDIGLVVSSAGLSIWTEWISFPNACCLSVVRASDQQVIDNDIANSTSCIVFVVSESISWEMQKERFNSLLAYIPDESNLPLLIFSGDTYNEGYEYASKYIINMLGLNGLNRGKIGLSLVIFLVENYTEDHANGFFDDDKLREGLKWLVSSLPVQPDVTLVKTHELLLEYLNPQLELLNTHVAPGAGPGDCISVFNNAVNQLAEEILAAANANRSQWPAPEIDLLERTSNERIYAEMFLPSIGWSSPSRIQPLLAAINSCKIPEFSYDLSWLNHGSHMGKQIQDQKKLLEECLARYLTESARLLDESQVVTEVNVMVQNCVGLELRDSSYYLAPRWVAIFRRIYNWRLAKLSTGKFSEAYVLTQHLYQAPAAAGSNGTTQGLTANTASSDAVDHIMMPAVSTGITLDEIIEISCDLDAVDAQPVTLAPRLPVHVHEEPQALADNNGVHGVDEMYIPRRVELGEVMPIETDDKLSQLRVELGEVMPIETDDKLSRLLEQCTKLQDRIDETLSIYF

SEQ ID NO: 79807 - protein, 405 aa, Zea mays
  Coding DNA Sequence Number=SeqID_38028
  Gene Ontology: Mol. function=nucleic acid binding; Cellular component= nucleolus
  Homolog annotation: Hit_ID=Q01G91; Match level="QueryCoverage=49%, HitCoverage=13%, E-value=2e-32, Identity=40%"; Hit description=[UD] KOG1860 Nuclear protein export factor
  Subcellular localization annotation: CTP_CleavageSite=34; ConfidenceScore=5.15e-01
MMKMLKPQKGCDHLHQSFTRMVKSPPSDTRGNIRSSSVDFGSNNSVQNLHAYADVQKSDASFSKFRNQIQSRIGGACSPSQQMSHLSDSNELNTLAISPPKPSTLSATRRTGISSLDATADDHLTPSTELEREEQAKAKRLARFHVELSRPVENTNDFVKTVKSSADKSKQATSVGRTPLRTNDDTDDNTLVDMDSTALAAIVGLCHDMCPEPERAERERKGDLDRYERLDGDRNLTTELLAVKKYNRTAERDADLIRPLPILQKTMEYLLSLLDHTYDDSFLGLYNFLWDRMRAIRMDLRMQHFFNQEAISMLEQMIRLHIIAMHELCEYNKGEGFSEGFDAHLNIEQMNKTSVELFQMYDDHRREGVLFSTEKEFRGYYALLKLDKHPGYKVRQLEQIWSFAF

SEQ ID NO: 79808 - protein, 127 aa, Zea mays
  Coding DNA Sequence Number=SeqID_38029
MGRWLGEGGGGRAAAGGHGARRTASSARQQEERARREGLELGRRPWKLQGGACCRGTAREKRSSSMAAGRAELRPRGQQEGAAPWLLRCGGRRPWEAESTQGGGAELPAARYVEEDREKKKKVAARG

SEQ ID NO: 79809 - protein, 82 aa, Zea mays
  Coding DNA Sequence Number=SeqID_38030
MGRWLGEGGGEQQGRKEARPWLLAEQNSDQGDSRRVPRHGCCAVEVVGHGRQRAHREVELSSLLHAVWKKTGRKRRRWRLGG

SEQ ID NO: 79810 - protein, 135 aa, Zea mays
  Coding DNA Sequence Number=SeqID_38031
MEEPLRMHRKIEGRRGTSWISSPWGRRAQGGKLGHGNGCLLPCCGRKKQGAPWRSFCASCSKDAIGEGDAGLGAPCTQGNSRGEKKLVHGCCAVEAVGHGRQRARREVELSSLLHAVWKKTGKKKKKVAARGVGE

SEQ ID NO: 79811 - protein, 149 aa, Zea mays
  Coding DNA Sequence Number=SeqID_38032
MEEPLRMHRKIEGRRGTSWISSPWGRRAQGGKLGHGNGCLLPCCERKKQGAPWRSFCASCSKDAIGEGGAGLGAPCTQGNSRGEKKLVHGCCAVEAVGHGRQRARREVELSSLLHAVWKKTGKKKKKVAARGSEKANRGILKIAVDTGF

SEQ ID NO: 79812 - protein, 164 aa, Zea mays
  Coding DNA Sequence Number=SeqID_38033
MEEPLRMHRKIEGRRGTSWISSPWGRRAQGGKLGHGNGCLLPCCERKKQGAPWRSFCASCSKDAIGEGGAGLGAPCTQGNSRGEKKLVHGCCAVEAVGHGRQRARREVELSSLLHAVWKKTGKKKKKVAARGSEKANRGILKLLSIRGFEFGSDMRYLAESNKN

SEQ ID NO: 79813 - protein, 270 aa, Zea mays
  Coding DNA Sequence Number=SeqID_38034
  Pfam annotation: Domain name=zf-GRF; Domain location=34-78; Score =10.5; E_value=0.0016; Accession=PF06839.3; Description=GRF zinc finger
MYREALWQKRGRPRELYPDVSSKDAPVPPELPVPNCDCGRLAWVHQSQHPDTAARCYYLCGTLDGHQRCFFFQWIDGPDKFDPRYLLFVNWLSGKTNHERFKRWVPPPPNPPPMTDAEKEVATERRMDSPPRCDCGDRAVIDEDYDKQFCCPNIDYPYGWRKCRFREWLYGPLSHWPEPEVKEKIYMGWAAEEVKFDPVLCKCGIEAKYGLVPSELGVGYFCGHMVDYDELGVGYFCGHMVDYDGLVPSELVLPLHQSKCQRNQCVVCVA

SEQ ID NO: 79814 - protein, 472 aa, Zea mays
  Coding DNA Sequence Number=SeqID_38035
  Pfam annotation: Domain name=zf-GRF; Domain location=34-78; Score =10.5; E_value=0.0016; Accession=PF06839.3; Description=GRF zinc finger
MYREALWQKRGRPRELYPDVSSKDAPVPPELPVPNCDCGRLAWVHQSQHPDTAARCYYLCGTLDGHQRCFFFQWIDGPDKFDPRYLLFVNWLSGKTSHERFKRWVPPPPNPPPMTDAEKEVATERRMDSPPRCDCGDRAVIDEDYDKQFCCPNIDYPYGRRKCRFREWLYGPLSHWPEPEVKEKRYMGWAVEEVKFDPVLCKCGIEAKYGLVPSELGVGYFCGHMVDYDEETRKCSWESYDDKGEVMRTIESKRIMGQKMRCGSRLVDSYINDRIRDMRREAKSAFYDSPKRAEYRRLKAADEKRAQDAREWEATQAEKQMLDNLADRLKGKIGSGVNYLADEAHARYVQDKMATMEEEDDDTSRLSELIALAEAGLHEEEEDDTSRLKEEDEFMSQAAAEVEAAYYKKKSDEAEAEDELFSQAADEAEANYYKRTGDKCDAGQCNKWNEVVVEDCATDDSEDELLIDCDSD

SEQ ID NO: 79815 - protein, 223 aa, Zea mays
  Coding DNA Sequence Number=SeqID_38036
MNGEVMNVVLFMMRQLNDLKMDKNQNLAYAPYIMALIKAKTRFEGPCEIVHTPFRPFKNEIGFLTRPLTPFPDDEEDPGYNAGAAPDVEAEQMPPPPPPPQPQQYWQPGLGYFDPYFHNIQQGLETHIDTRFEGMMTHVDHHLDDMQSRFDNPTPAQVGVHRRRGFSSSDQPESLAPCQAAPSVVSGDLDFAIVLAESSPTSLTTQTTPAPLETPVCLISSCC

SEQ ID NO: 79816 - protein, 223 aa, Zea mays
  Coding DNA Sequence Number=SeqID_38037
MNGEVMNVVLFMMRQLNDLKMDKNQNLAYAPYIMALIKAKTRFEGSCEIVHTPFRPFKNEIGFLTRPLTPFPDDEEDPGYNAGAAPDVEAEQMPPPPPPPQPQQYWQPGLGYFDPYFHNIQQGLETHIDTRFEGMMTHVDHHLDDMQSRFDNPTPAQVGVHRRRGFSSSDQPESLAPCQAAPSVVSGDLDFAIVLAESSPTSLTTQTTPAPLETPVCLISSCC

SEQ ID NO: 79817 - protein, 218 aa, Zea mays
  Coding DNA Sequence Number=SeqID_38038
NRRPKEDDSWAQGPCARDWAVGFGGGKEAHNHRRRRALHALVRLLRTQKPARLVYDMWAWAPMPEVGPLVAAKTRRVGAAGLVFPLLEVCGLVGAALFHRCLASRMFINLAVVESELSRGFASHMGWWPASSSSIRRKRMITSLVKEANFGYAVPARPQALPSAEGGGEGLFAMARTLRWSPPLGRLPGAEVVAATEVVASAGEPPRASFQRDPAGAE

SEQ ID NO: 79818 - protein, 263 aa, Zea mays
  Coding DNA Sequence Number=SeqID_38039
MAQGHISLSLTDGILEYTTFSGHVAAPELPMRKVRGTPDSGYDSGPRARLRGGYEPAGPCARDWAVGFGGGKEAHNHRRRRALHALVRLLRTQKPARLVYDMWAWAPMPEVGPLVAAKTRRVGAAGLVFPLLEVCGLVGAALFHRCLASRMFINLAVVESELSRGFASHMGWWPASSSSIRRKRMITSLVKEANFGYAVPARPQALPSAEGGGEGLFAMARTLRWSPPLGRLPGAEVVAATEVVASAGEPPRASFQRDPAGAE

SEQ ID NO: 79819 - protein, 47 aa, Zea mays
  Coding DNA Sequence Number=SeqID_38040
MADWECLPRHGMYLPHHVHGRPFICKIHGRRGSKKVFEGRTKFCYSS

SEQ ID NO: 79820 - protein, 191 aa, Zea mays
  Coding DNA Sequence Number=SeqID_38041
MARTKTTQHKSTGPHGVPRHELASRHEGSSSGSNDPIGDLEARVDRLRSELRHGCRERARDSRRIAELSAEVNRLQYKITKCNTTIDWAINSRSFAWDCVANALARVAELSASLENLEAYCNTLLEEVHVLYDRLHPNVPPEVAAMGARPSGTANGRSDGGIDLFGAPPSMNLADERSPEAGSGTTKDEED

SEQ ID NO: 79821 - protein, 81 aa, Zea mays
  Coding DNA Sequence Number=SeqID_38042
MAGALWGLKFFGCGQLLAEGNVTTVFVAESFWCLLVCVPDITVAGGDGHVVACQRGGTARSGCSLARGGGRTVAVENPMNG

SEQ ID NO: 79822 - protein, 339 aa, Zea mays
  Coding DNA Sequence Number=SeqID_38043
  Pfam annotation: Domain name=IQ; Domain location=125-145; Score=23.6; E_value=0.00072; Accession=PF00612.17; Description=IQ calmodulin -binding motif
MWGRTYARQKREAAGGAGSSARKEGMAKESLTKPMAKGYNLAGEDNYPHGPTPGISSRLSSPPPPAHPSPPPAAAPSATATSSHPLSPTPDAFTRLEESFGRFVEQWDQFVVMFHRYKEKTEKELQAAVRLQTVARGFLARRQVQSLRGEKHLVVASRATPWPSSHEQAVKPREIGSTSSLPSNDAQDDVPVLGDRCHGELMACRGPSEHSKLRGGRESSSTFCASVVPYHMRFTDCRSGIVAMAGALWGLKFFGCGQLLAEGNVTTVFVAGECLFLCSRLFWVGLESFWCLLVCVPDITVAGGDGHVVACQRGGTARSGCSLARGGGRTVAVENPMNG

SEQ ID NO: 79823 - protein, 100 aa, Zea mays
  Coding DNA Sequence Number=SeqID_38044
MAGGNSLAGAKERWLADEGECGAKRGSNGSWCGFLRETLGDTGVSQPSPLKGISSRDSGQSPPGVKRRVRLIGKRVMIVNIRAKLLFECHSLCNFRRKSF

SEQ ID NO: 79824 - protein, 100 aa, Zea mays
  Coding DNA Sequence Number=SeqID_38045
MAGGNTLAGAKERWLADEGECGAKRGSNGSWCGFLKETLGDTGVSQPSPLKGISSRDSGQSPPGVKRRVRLIGKRVMIAIIRAKLLFECHSLCNFRRKSF

SEQ ID NO: 79825 - protein, 100 aa, Zea mays
  Coding DNA Sequence Number=SeqID_38046
MASGNTLAGAKERWLADEGECGAKRGSNGSWCGFLRETLGDTGVSQPSPLKGISSRDSGQSPPGVKRRVRLIGKRVMIVIIRAKLLFECHSLCNFRRKSF

SEQ ID NO: 79826 - protein, 100 aa, Zea mays
  Coding DNA Sequence Number=SeqID_38047
MAGGNTLAGAKERWLADEGECGAKRGSNGSWCGFLRETLGDTGVSQPSPLKGISSRDSGQSPPGVKRRVRLIGKRVMIVIIRAKLLFECHSLCNFRRKSF

SEQ ID NO: 79827 - protein, 100 aa, Zea mays
  Coding DNA Sequence Number=SeqID_38048
MAGGNTLAGAKERWLADEGECGAKRGSNGSWCGFLRETLGDTRVSQPSPLKGISSRDSGQSPPGVKRRVRLIGKRVMIVIIRAKLLFECHSLCNFRRKSF

SEQ ID NO: 79828 - protein, 100 aa, Zea mays
  Coding DNA Sequence Number=SeqID_38049
MAGENTLAGAKERWLADEGECGAKRGSNGSWCGFLRETLGDTGVSQPSPLKGISSRDSGQSPPGVKRRVRLIGKRVMIVIIRAKLLFECHSLCNFRRKSF

SEQ ID NO: 79829 - protein, 100 aa, Zea mays
  Coding DNA Sequence Number=SeqID_38050
MAGGNTLAGAKERWLADEGECGAKRGSNGSWCGFLRETLGDTGVSQPSPLKGISSRDSGQSLPGVKRRVRLIGKRVMIVIIRAKLLFECHSLCNFRRKSF

SEQ ID NO: 79830 - protein, 100 aa, Zea mays; identical to SEQ ID NO: 79826
  Coding DNA Sequence Number=SeqID_38051

SEQ ID NO: 79831 - protein, 97 aa, Zea mays
  Coding DNA Sequence Number=SeqID_38052
MAGGNTLAGAKERWLADEGECGAKRGSNGSWCGFLRETLGDTGVSQPSPLKGISSRDSGQSPPGVKRRVRLIGKRVMIVIIRAKLLFECHSLCNFRR

SEQ ID NO: 79832 - protein, 55 aa, Zea mays
  Coding DNA Sequence Number=SeqID_38053
MAGGNTLAGAKERWLADEGECGAKRGSNGSWCGFLRETLGDTGVSQLVLVPEVVL

SEQ ID NO: 79833 - protein, 153 aa, Zea mays
  Coding DNA Sequence Number=SeqID_38054
MAKLTKALTRLGGDWSGLAMVAEALAAMAGGKELAGAKEGRLAGDGFELGIKVNTLYLWLKGSIRVFIGVATFCPFENPFVLNMILLSISLVDPLLFSQFDAHAQFGSHKMMVLGLALERNPGVSQLLIINIKVRKVLLIKEDPKAALNRELG

SEQ ID NO: 79834 - protein, 90 aa, Zea mays
  Coding DNA Sequence Number=SeqID_38055
MGLGRAEGHGVGYVKSNLACMKLLRLGQTFHCSRKEKGNNMCGYYVYRLIHTFVEWESRVVGKMCNLCRVLEIGISAEFTVKSNLGILFD

SEQ ID NO: 79835 - protein, 56 aa, Zea mays
  Coding DNA Sequence Number=SeqID_38056
MAVNGGQGVVLTLPRWGAEAGKGSRFVGKVYNLCRVLETGISVELMVKSSLGILFD

SEQ ID NO: 79836 - protein, 99 aa, Zea mays
  Coding DNA Sequence Number=SeqID_38057
MAQITGYHFTHARPASRRTCRSHVPLEPGPTDNKQSVVPECVAEDLPEQQPGDSGHFPEYLSAGKGSRLVGKVCNLCRVLEIGISAELMVKSSLGILFD

SEQ ID NO: 79837 - protein, 156 aa, Zea mays
  Coding DNA Sequence Number=SeqID_38058
  Subcellular localization annotation: CTP_CleavageSite=66; ConfidenceScore=5.46e-01
MPRWSSSGPPKTFSLPFSPLCPQIRGLFSAIEFAVAFSPSLPNLGNLGTPLAHVCLNSSDLTTVERSSAARSRSSLPDLISPVRSGSHSLDRGYRFAHARPAPLARLSAPVFLGAGPARLGKGSRLVGKVCNLCRVLETGISAELMVKSSLGILFD

SEQ ID NO: 79838 - protein, 126 aa, Zea mays
  Coding DNA Sequence Number=SeqID_38059
MKHKNRSSQTHSKISLQRFEMGEARGVCERVGGVSQVPTKAGGRWGKLAKNRLNRFVNRLNRFPPGRTRFTDLLSRRVDRTQNRLSRAQIRLNRFSQNLHTTFSDRTDWQTGSDRAEQCRNRLNRF

SEQ ID NO: 79839 - protein, 126 aa, Zea mays; identical to SEQ ID NO: 79838
  Coding DNA Sequence Number=SeqID_38060

SEQ ID NO: 79840 - protein, 113 aa, Zea mays
  Coding DNA Sequence Number=SeqID_38061
MPADPIDGAQRRIAHDNHGGAPTFTLLNTNPTAIAGFGGPRGRSGGTTRATVEIGWQASLRNSQRHSVAPAREFHGEDPSARGPTRQRTTAIAGAEYSAGVQGLANWAHLAET

SEQ ID NO: 79841 - protein, 206 aa, Zea mays
  Coding DNA Sequence Number=SeqID_38062
MGGAEPGSFAEKDPSRATGVPVARRVGLGPRLACQKLEKRVHLARLHAACMAARPFCPLVWAEMGGRLAGSSRLPSPRMGDIRRISASSLEERNSMGVGTSQPSFGFKDFHQPAWPYPATGGHPRWPRWKMRRVGEPPPRGSAAPFFPLRPGVKGVLEPHGDFLQPCQDMRGARGPGPPFPCLNGWFSSSVGGEPFRRDTSPKAAA

SEQ ID NO: 79842 - protein, 206 aa, Zea mays
  Coding DNA Sequence Number=SeqID_38063
MGGAEPGSFAEKDPSRATGVPVARRVGLGPRLACQKLEKRVHLARLHAACMAARPFCPLVWAEMGGRLAGSSRLPSPRMGDIRRLSASSLEERNSMGVGTSQPSFGFKDFHHPAWPYPATGGHPRWPRWKMRRVGEPPPRGSAAPFFPLRPGVKGVLEPHGDFLQPCQDMRGARGPGPPFPCLNGWFSSSVGGEPFRRDTSPKAAA

SEQ ID NO: 79843 - protein, 306 aa, Zea mays
  Coding DNA Sequence Number=SeqID_38064
  Subcellular localization annotation: CTP_CleavageSite=21; ConfidenceScore=5.30e-01
MVASFLSCDILRPPQSVAFPSATAIISVRRRSAATDNVSHAIPCPAPASAHPLALAPVFEEVVTLPPSSTPPARPHPPNPWSLLDSSDYRGAAHRIYGAASVLIGIRRGGSCLPGIGVACLRSEMDRIRDGRRGRVSAGGVPRPLRRRLRSNGGGGPRDSPRSERRRGERLMLFGGGGCASRDHGDDISDESLGGDDADAEQELASRYHQQRRSPSMAPPPPSPPLLHHASAPRLRNVHPVGVNRIVSVGVPRVLPDERIHWFVSTDKVVFLAHEALDIFKRRGCCRSIDHQPMLCMALFRSGSGS

SEQ ID NO: 79844 - protein, 302 aa, Zea mays
  Coding DNA Sequence Number=SeqID_38065
  Subcellular localization annotation: CTP_CleavageSite=21; ConfidenceScore=5.30e-01
MVASFLSCDILRPPQSVAFPSATAIISVRRRSAATDNVSHAIPCPAPASAHPLALAPVFEEVVTLPPSSTPPARPHPPNPWSLLDSSDYRGAAHRIYGAASVLIGIRRGGSCLPGIGVACLRSEMDRIRDGRRGRVSAGGVPRPLRRRLRSNGGGGPRDSPRSERRRGERLMLFGGGGCASRDHGDDISDESLGGDDADAEQELASRYHQQRRSPSMAPPPPSPPLLHHASAPRLRNVHPVGVNRIVSVGVPRVLPDERIHWFVSTDKVVFLAHEALDIFKRRGCCRSIDHQPMLCMALFRS

SEQ ID NO: 79845 - protein, 262 aa, Zea mays
  Coding DNA Sequence Number=SeqID_38066
ESITDDSDHNVCLSRPELYYYEEPKGADALAVGGYKRSRGRERESLCVSPSSRAATFSYEGPGPSFYRCKERVQVYNRERSNVLTCLAGRSQSPMYMPTWLLERCCCPVHVMSWPSEERLSLVEAQLSGAVGSLLTSPCFRKGLRTAIVMDHRPSSEVEVESEPWGRARRRPSSGVESFLWRLRLDLATVSLTLAGGTVVGAGQATLFSCQAILALNAPAIRSAGEAIWPRLLLWEACPSWASSESKLCADGGYQLRLGVLG

SEQ ID NO: 79846 - protein, 74 aa, Zea mays
  Coding DNA Sequence Number=SeqID_38067
MGRAINKTVMVVELIKEDPTNSDSDAKNSGRTEFPADEDAHSVGDCVKESITDDSDHNVCLSRPELYYYEEPKG

SEQ ID NO: 79847 - protein, 113 aa, Zea mays
  Coding DNA Sequence Number=SeqID_38068
IGLSPWMELGWGRKKLAGDAVQVLAAMGETRARCHGGSFSALRKKEQGAPWLAEGRSSPFGAVAGGACDCLAVEAVSHGRQRAEGMHAKEEEGWRGEKKTGRLWRLGRSEGWE

SEQ ID NO: 79848 - protein, 173 aa, Zea mays
  Coding DNA Sequence Number=SeqID_38069
MGAAAAALCSSSTRDREGRAAEGHPWEGVLCWACSPEGKRKKTPWGTSSKGRPWRKSCCSIGLSPWMELGWGRKKLAGDAVQVLAAMGETRARCHGGSFSALRKKEQGAPWLAEGRSSPFGAVAGGACDCLAVEAVSHGRQRAEGMHAKEEEGWRGEKKTGRLWRLGRSEGWE

SEQ ID NO: 79849 - protein, 174 aa, Zea mays
  Coding DNA Sequence Number=SeqID_38070
MALGKEGNLGTGKDIFAECHCQGTRQRDWQRGPLEGSLPSTCPTDTRQRSLLCRVPTRALGTGTGSGAHWMQQILGGVQEDYRRLARAFDKFVITNFPSHDFETKENPQYPSAANGHMSDPSYFMGCRLTLTPDSYILHHLYGKQPVPMRTGGRSGLAAVGSIPCNEPSKPTPG

SEQ ID NO: 79850 - protein, 75 aa, Zea mays
  Coding DNA Sequence Number=SeqID_38071
MALGKEGNLGTGKDIFAECYCQGTRQRDWQRGPLEGSLPSTCPTDTRQRVLLCRVPTRALGTGTGSGAHWQKVFK

SEQ ID NO: 79851 - protein, 173 aa, Zea mays
  Coding DNA Sequence Number=SeqID_38072
  Homolog annotation: Hit_ID=Q8L866; Match level="QueryCoverage=28%, HitCoverage=6%, E-value=2e-11, Identity=66%"; Hit description =Putative copper amine oxidase
MAPNYPDKGSEKSRGFGFVQFATVQDVDRAIQQKNGSPVSVQVKDSDAKDEADEISPAEKHKGKSHKADPVFFNTDAICYVELEQLHLLSNDAKVVEVNVKVESAGTCNVHNNDFYAKEKLLKSMRDCDPSSVRHWIDRNEKLFYKLLIDNVEELLPIMYTPTAGGSLLFPAL

SEQ ID NO: 79852 - protein, 346 aa, Zea mays
  Coding DNA Sequence Number=SeqID_38073
  Homolog annotation: Hit_ID=Q8L866; Match level="QueryCoverage=26%, HitCoverage=13%, E-value=3e-26, Identity=62%"; Hit description =Putative copper amine oxidase
  Pfam annotation: Domain name=Cu_amine_oxid; Domain location=76-340; Score=-254.1; E_value=0.0072; Accession=PF01179.10; Description =Copper amine oxidase, enzyme domain
MKSVVVASSDPRPPRRRPRPTGPSSTYECILCACCSTSCPSYWWNPEEYLGLAALLHANSYTPTHDLFCDVLAWETKPLILERPVLGMRGPTGGYPGKEKIRIARPDSQGGCLDLLELNLVRLETVRHMLMITVTLSKKPLDTSSPGFPAYPYYSISTLTGNLSLGALMLGESRKYGTTIVPGLYAPVHLHFFVARMDMAVDCKLNEVVEVNVKVESAGTHNMHNNDFYAKEKLLKSMRDCDPSSLRHWILWQRKFQAPLQHYTALMDLQDYSENGTVTVVYRVILKGTDGEAYRDATGTTQFHEGRREDAVAAAEEAAFSKACAWFGFGLYLYHQDESHYDDHFH

SEQ ID NO: 79853 - protein, 756 aa, Zea mays
  Coding DNA Sequence Number=SeqID_38074
  Homolog annotation: Hit_ID=Q8W1L6; Match level="QueryCoverage=7%, HitCoverage=7%, E-value=1e-12, Identity=67%"; Hit description =Peroxisomal fatty acid beta-oxidation multifunctional protein (MFP) [Includes: Enoyl-CoA ...
  Homolog annotation: Hit description=hydratase (EC 4.2.1.17); 3-2 -trans-enoyl-CoA isomerase (EC 5.3.3.8); 3-hydroxybutyryl-CoA epimerase (EC 5.1.2.3); 3-hydroxyacyl-CoA dehydrogenase (EC 1.1.1.35)]
MSLDFKLILDELNRRFDELEVRWDRRFSPSVYLDLPPTLLSVHQSSDASASAPPTPTAAVGAVVIADNWGGCFDDGKQYYVAPSVVADNWGGLFEGCDAGGDISSNLLDSDPDEAFVTSHSDKALLDNHHAGELIATGIEYGSYSSVHGSGGAALSHLAHSNTNFAMPTTCSTWGLTEHAMAKAVHRRALWMLRREPLPRLLRAFLTLERLNLSAYASLDDASLAASVADGPAAATTWWCTLKGIRGSDTPFVMDLDDAATVAGGVEDTYGEDRATEEQLATPLDTLMCARLDPVKSHIGCLLLQHLKLSPTLIGAKVVFEEMQQSTILRDAHTTICTTPDPALDAHFANKWRMRCSHNSTSTAEAALEFDPDNCTTCNTSYYHHVAQPRGLLRSDASLLDHRFTRVYVMQVAFGRFDGHFFHDFTIIKSKTDNSSSSPLECSTKCLSLDIGLFSEARAVLNAARPQAMKIAPNMPQHQTCIAVMEEGILCGGQPGVLKEAIVCSIPSVMVFTWTVKNFSGVTGLYSQHDRGTVWLIVAPDCYFIQHNERVHMIFCGFDLLSLQHLQGHFTEADMFAPWDGQELTQFQFSELSIYWQQSHGLNSLFFFRKLKYSSSVEEFCGAQFSFPNILLPKSWSQELATNIERHLLPEMIEVANGYIFHELHLMLASIGVTRMIGCGKYLIWIIGLLTPWDPGRVVFDLKFMMLWLEGKPNLKKGGMSYIQWWEQATYEDMKTIGPRRSEQAWAAFVKLSGPE

SEQ ID NO: 79854 - protein, 756 aa, Zea mays
  Coding DNA Sequence Number=SeqID_38075
  Homolog annotation: Hit_ID=Q8W1L6; Match level="QueryCoverage=7%, HitCoverage=7%, E-value=1e-12, Identity=67%"; Hit description =Peroxisomal fatty acid beta-oxidation multifunctional protein (MFP) [Includes: Enoyl-CoA ...
  Homolog annotation: Hit description=hydratase (EC 4.2.1.17); 3-2 -trans-enoyl-CoA isomerase (EC 5.3.3.8); 3-hydroxybutyryl-CoA epimerase (EC 5.1.2.3); 3-hydroxyacyl-CoA dehydrogenase (EC 1.1.1.35)]
MSLDFKLILDELNRRFDELEVRWDRRFSPSVYLDLPPTLLSVHQSSDASASAPPTPTAAVGAVVIADNWGGCFDDGKQYYVAPSVVADNWGGLFEGCDAGGDISSNLLDSDPDEAFVTSHSDKALLDNHHAGELIATGIEYGSYSSVHGSGGAALSHLAHSNTNFAMPTTCSTWGLTEHAMAKAVHRRALWMLRREPLPRLLRAFLTLERLNLSAYASLDDASLAASVADGPAAATTWWCTLKGIRGSDTPFVMDLDDAATVAGGVEDTYGEDRATEEQLATPLDTLMCARLDPVKSHIGCLLLQHLKLSPTLIGAKVVFEEMQQSTILRDAHTTICTTPDPALDAHFANKWRMRCSHNSTSTAEAALEFDPDNCTTCNTSYYHHVAQPRGLLRSDASLLDHRFTRVYVMQVAFGRFDGHFFHDFTIIKSKTDNSSSSPLECSTKCLSLDIGLFSEARAVLNAARPQAMKIAPNMPQHQTCIAVMEEGILCGGQPGVLKEAIVCSIPSVMVFTWTVKNFSGVTGLYSQHDRGTVWLIVAPDCYFIQHNERVHMIFCGFDLLSLQHLQGHFTEADMFAPWDGQELTQFQFSELSIYWQQSHGLNSLFFFRKLKYSSSVEEFCGAQFSFPNILLPKSWSQELATNIERHLLPEMIEVANGYIFHELHLMLASIGVTRMIGCGKYLIWIIGLLTPWDPGRVVFDLKFMMLWLEGKPNLKKGGMSYIQWWEQATYEDMKTIGPRRSEQAWAAIVKLSGPE

SEQ ID NO: 79855 - protein, 87 aa, Zea mays
  Coding DNA Sequence Number=SeqID_38076
  Homolog annotation: Hit_ID=O22424; Match level="QueryCoverage=40%, HitCoverage=13%, E-value=3e-12, Identity=94%"; Hit description=40S ribosomal protein S4
MGKPVPSLLMLILSRGQIQLDEVHDLVGLQIDLDGVVGLDERVGVADGAVVVGVQKPKPNGPNADRLIVAALAANRLNGRAGSVPNF

SEQ ID NO: 79856 - protein, 364 aa, Zea mays
  Coding DNA Sequence Number=SeqID_38077
  Homolog annotation: Hit_ID=O22424; Match level="QueryCoverage=15%, HitCoverage=21%, E-value=4e-25, Identity=94%"; Hit description=40S ribosomal protein S4
  Pfam annotation: Domain name=Ribosomal_S4e; Domain location=4-71; Score=75.5; E_value=1.6e-19; Accession=PF00900.10; Description =Ribosomal family S4e
MDEEMDEDVIVKVVDCSNQSEFKLCKVRSVQFGQKGIPYLNTYDGRTIRYPDPLIKANDTIKIDLETNKIMDFIKFDEAGLQQFQIQINSNMCNTSKNSSKDKSGDGLRLEDLSDEKVDFDPNEDDLLSSQELEEFAKDMEEMQTDFQAKVGEVLSIPSTKDEKQDPVGKKSSEIQMSTTESIRKSSRLEKNEDIKVADKAISRAEAKDTFLNKGMNNNSFSLLNASNEDLCDISNKLGVCLGSSESTVMANLDLIRDLEMSRKILAIQSCGIKKTEEPIVDDFNEVDSSVHADSEKEIDYDLLDVMVLRKGRKIKHRKNQQKKASPKFRCTPNKKREAEKFYLPQTPSDDRPHLELSGFRDWF

SEQ ID NO: 79857 - protein, 80 aa, Zea mays
  Coding DNA Sequence Number=SeqID_38078
  Gene Ontology: Mol. function=structural constituent of ribosome; Cellular component=ribonucleoprotein complex; Biological process =translation
  Homolog annotation: Hit_ID=O22424; Match level="QueryCoverage=77%, HitCoverage=23%, E-value=3e-23, Identity=82%"; Hit description=40S ribosomal protein S4
  Pfam annotation: Domain name=Ribosomal_S4e; Domain location=7-67; Score=62.2; E_value=1.7e-15; Accession=PF00900.10; Description =Ribosomal family S4e
MAFHSAQLDLSPEHRRKFKLCKVRSVQFGQKVIPYLNTYDDRTIRYPDPLIKANDTIKIDLETNKIMDFIKLTSSSYILS

SEQ ID NO: 79858 - protein, 214 aa, Zea mays
  Coding DNA Sequence Number=SeqID_38079
  Homolog annotation: Hit_ID=O22424; Match level="QueryCoverage=27%, HitCoverage=21%, E-value=2e-25, Identity=94%"; Hit description=40S ribosomal protein S4
  Pfam annotation: Domain name=Ribosomal_S4e; Domain location=4-71; Score=75.5; E_value=1.6e-19; Accession=PF00900.10; Description =Ribosomal family S4e
MDEEMDEDVIVKVVDCSNQSEFKLCKVRSVQFGQKGIPYLNTYDGRTIRYPDPLIKANDTIKIDLETNKIMDFIKFDEAGLQQFQIQINSNMCNTSKNSSKDKSGDGLRLEDLSDEKVDFDPNEDDLLSSQELEEFAKDMEEMQTDFQAKVGEVLSIPSTKDEKQDPVGKKSSEIQMSTTESIRKSSRLEKNEDIKVADKAISRAEAKDTFLNK

SEQ ID NO: 79859 - protein, 328 aa, Zea mays
  Coding DNA Sequence Number=SeqID_38080
  Gene Ontology: Mol. function=protein kinase activity; Cellular component=integral to membrane; Biological process=protein amino acid phosphorylation
  Homolog annotation: Hit_ID=Q2QZC3; Match level="QueryCoverage=44%, HitCoverage=12%, E-value=2e-61, Identity=79%"; Hit description =Leucine Rich Repeat family protein
  Pfam annotation: Domain name=Pkinase; Domain location=19-285; Score= -33.2; E_value=1.4e-06; Accession=PF00069.15; Description=Protein kinase domain
  Pfam annotation: Domain name=Pkinase_Tyr; Domain location=19-211; Score=-74.7; E_value=6.9e-08; Accession=PF07714.7; Description =Protein tyrosine kinase
  Pfam annotation: Domain name=Ribosomal_S4e; Domain location=257-328; Score=45.2; E_value=2.2e-10; Accession=PF00900.10; Description =Ribosomal family S4e
  Pfam module annotation: Pfam domain module=Pkinase::Pkinase _Tyr::Ribosomal_S4e; Domain location=19-285::19-211::257-328
MANHQLVSYHELARATENFSDANLLGSGSFGKVFKGQLSNGLVVAVKVIRMHMEQAAARFDAECCVLRMARHRNLIRILNTCSNLDFRALVLQYMPNGSLEELLRSVNRGMRLGFVERLDIVLDVSMAMEYLHHEHCEVVLHCDLKPSKLRHETLKQQLCRKLINGVSVHKHVPGQSSVIPPETNSISMQDLKAPNESLYEQKPEETTPVLPSSVIASTAARSKPHTSRFEYVENAAAPKTGSSSEGNLMSGHVAPPKSSNFFVEFGMDSGYHKKYTSSSSKVQFKLCKVRSVQFGQKGIPYLNTYDDRTIRYPDPLIKANDTIKIDL

SEQ ID NO: 79860 - protein, 160 aa, Zea mays
  Coding DNA Sequence Number=SeqID_38081
  Gene Ontology: Mol. function=protein dimerization activity; Cellular component=nucleus; Biological process=regulation of transcription, DNA-dependent
  Homolog annotation: Hit_ID=Q39162; Match level="QueryCoverage=65%, HitCoverage=30%, E-value=2e-25, Identity=54%"; Hit description =Transcription factor TGA4
MEIDYSHWVDEQKRHMAELTSTLQGQQTSELELRLLVETWLSNYERLFRIKATAANADVFYVMSGLWKTPAKRFFLWIGGFRPSDVLKDDLVQLLTLFLMRRSRQQIIVKAPLVPRCLGGSPPRNQPSQRQGDYSYLNRVFRDLFIQEDTSSTMCLTGPF

SEQ ID NO: 79861 - protein, 246 aa, Zea mays
  Coding DNA Sequence Number=SeqID_38082
  Homolog annotation: Hit_ID=Q39162; Match level="QueryCoverage=39%, HitCoverage=26%, E-value=9e-26, Identity=56%"; Hit description =Transcription factor TGA4
MALLVVRSHKGKVMGYTSPFFLLAFTTQFQLTRKIEGQLIFILSGGCNQNQDASACVTGFEIDYSHWVDEQKRHMAELTSTLQGQQTSELELRLLVETWLSNYERLFRIKATAANADVFYVMSGLWKTPAKRFFLWIGGFRPSDVLKDVALSRGGSPGVMTWGWVWELFSNLGVLGFGSASHFVFNEKKQTTNYSEGSSRPPLLGGSPPRNQPSQRQGDYSYLNRVFRDLFIQEDTSSTMCLTGPF

SEQ ID NO: 79862 - protein, 193 aa, Zea mays
  Coding DNA Sequence Number=SeqID_38083
  Subcellular localization annotation: CTP_CleavageSite=66; ConfidenceScore=5.65e-01
MPTSVRNQLQRPAECPPAPRKPVWAPPLPSTPANKRSRPSPPSSAAPARRAFFPVARPHHRVPRPAAQEADPRGVTLARRTGRRGSGESVSTDDLPPALSTTPAPIALLRGGCFFAQYPVRPPPSLRVWVPMAMETSSAPAAATEAGWYVLGPNQEGVGPYVIAEIRGGCFLHSPSNSTRFKAARSGHHRFNQ

SEQ ID NO: 79863 - protein, 224 aa, Zea mays
  Coding DNA Sequence Number=SeqID_38084
  Homolog annotation: Hit_ID=Q8SA97; Match level="QueryCoverage=14%, HitCoverage=6%, E-value=1e-07, Identity=75%"; Hit description =Ornithine carbamoyltransferase
  Subcellular localization annotation: CTP_CleavageSite=66; ConfidenceScore=5.58e-01
MPTSVRNQLQRPAECPPAPRKPVWAPPLPSTPANKRSRPSPPSSAAPARRDFFPVARPHHRVPRPAAQEADPRGVTLARRTGRRGSGESVSTDDLLPALSTTPAPIALLRVWVPMAMETSSAPAAATEAGWLVLSLEKPGKLLAYKEKGKVPDRFRKLQHAHHGRAEFTGCASPTGLLDSRDPYDLQQPQIGVSRTIIRGTLKSPNSQLVTPISTKLQRPDGCD

SEQ ID NO: 79864 - protein, 128 aa, Zea mays
  Coding DNA Sequence Number=SeqID_38085
  Gene Ontology: Mol. function=electron carrier activity; Biological process=protein amino acid phosphorylation
  Homolog annotation: Hit_ID=Q8RZ63; Match level="QueryCoverage=56%, HitCoverage=23%, E-value=2e-16, Identity=43%"; Hit description=ABC transporter-like protein
MGTSPRQRQPERRRLDDQHIVLHYQDLLRCVIKAPSTPFDVVRNVVEKQLGKNFDDMFEFVDVEPVGSASIAQKHDLNFDLFSATKEMEKQFCRFFYFISDRESVKLLLLENRQVLGFLKERHDVDQL

SEQ ID NO: 79865 - protein, 305 aa, Zea mays
  Coding DNA Sequence Number=SeqID_38086
  Gene Ontology: Mol. function=electron carrier activity; Biological process=protein amino acid phosphorylation
  Homolog annotation: Hit_ID=Q5N6W3; Match level="QueryCoverage=99%, HitCoverage=94%, E-value=3e-76, Identity=76%"; Hit description=ABC1 -like
  Pfam annotation: Domain name=ABC1; Domain location=123-191; Score= -20.0; E_value=0.0015; Accession=PF03109.7; Description=ABC1 family
MPLALAQLQDLRDRISDRLRPWSRSAQFWVRAADIYTSYKVCQLRAGFVKDEDELETMWERQHELGAEKMYSLCSELGGLFLKAAQILGKPDLAPMAWVKRLVTLCDQAPSTPFDVVRDVVEKQLGKNFDDMFEFFDVEPVGSASIAQKHDLNFDLFSATKEMEKQVALLDYGQVKEMPEDLRLAYANLVVAMADDDFSRAEESFRELGIRTWAITDNKLEELFQLSLRMFDTRLPPGVTVMSPFADDSSLNKIGVESFPEELFSVLRTIQLLRGLTVGMGLTFSCAQHWRPIAEEALLKAGRQS

SEQ ID NO: 79866 - protein, 166 aa, Zea mays
  Coding DNA Sequence Number=SeqID_38087
  Gene Ontology: Mol. function=nucleic acid binding; Cellular component= nucleus
  Homolog annotation: Hit_ID=Q6ZI17; Match level="QueryCoverage=97%, HitCoverage=19%, E-value=1e-70, Identity=82%"; Hit description =Putative meiosis protein mei2
MPTVNTNKFIEFYDVRAAEAALRSLNKSEIAGKRIKLEPSRPGGTRRNLMQQLGHDLDQEEPRTYIHSHVGSPIANSPPGAWAQYSSPTDSNMLQAFTRSPTGNGMSPIRIPSLISNAPKIAPIGKDSNRSKYDQVFSNGNQSLGAAFQHSHSYQDHNSNQESGEV

SEQ ID NO: 79867 - protein, 117 aa, Zea mays
  Coding DNA Sequence Number=SeqID_38088
  Gene Ontology: Mol. function=nucleic acid binding
  Homolog annotation: Hit_ID=Q6ZI17; Match level="QueryCoverage=96%, HitCoverage=13%, E-value=2e-45, Identity=78%"; Hit description =Putative meiosis protein mei2
MQQLGHDLDQEEPRTYRHSHVGSPIANSPQGAWAQYSSPTDSNMLQAFTRSPTGNGMSPIRIPSRISNAPKIAPIGKDSNRSKYDQVFSNGNQSLGAAFQHSHSYQDHNSNQESGEV

SEQ ID NO: 79868 - protein, 167 aa, Zea mays
  Coding DNA Sequence Number=SeqID_38089
MSGAPGDSNFELLGFGIFQRPLHYNSPDCPVCTGHVRCSKEGRPQELASLGFSLQPLRYNSPDCPVYTGLSGASAEQRLLQAPTATCSAFIARQRAQRSDTPMLAHRTPYSACPVDDELDGRDDTVVGCDAQNNPGVADVGNDHEVPCLTMDSTVQPLCTASKRRLR

SEQ ID NO: 79869 - protein, 137 aa, Zea mays
  Coding DNA Sequence Number=SeqID_38090
MSGAPGDSNFELLGFGIFQRPLRYNSPDCPVCTGHVRCSKEGRPQELASLGFSLQPLRYNSPDCPVYTGLSGASAEQRLLQAPTATCSAFIARQRAQRSDTPMLAHRTPYSAYPVRHRTSRRAQKSEASTVGIQRNW

SEQ ID NO: 79870 - protein, 176 aa, Zea mays
  Coding DNA Sequence Number=SeqID_38091
  Gene Ontology: Mol. function=protein-tyrosine kinase activity; Cellular component=integral to membrane; Biological process=protein amino acid phosphorylation
  Homolog annotation: Hit_ID=Q70KR3; Match level="QueryCoverage=90%, HitCoverage=27%, E-value=7e-14, Identity=34%"; Hit description=SYM10 protein
MATAAPTSIKGFNCTSNCTYSCQAYALYHAGFVGVPLDLAAIGDLFAVSRFMVVHANNLSTTAAPANWQPLLMSLQCGCPLRSPSSYAPMQYQIGPRDTYWIVSTTKLHNLTQYQIVERMNPMLVPTDLDVGTMVTFPAFCQCPVTANNATALITYVMQPGDTYASVAAAFSVAYP

SEQ ID NO: 79871 - protein, 196 aa, Zea mays
  Coding DNA Sequence Number=SeqID_38092
  Gene Ontology: Mol. function=protein-tyrosine kinase activity; Cellular component=integral to membrane; Biological process=protein amino acid phosphorylation
  Homolog annotation: Hit_ID=Q70KR3; Match level="QueryCoverage=81%, HitCoverage=27%, E-value=9e-14, Identity=34%"; Hit description=SYM10 protein
MATAAPTSIKGFNCTSNCTYSCQAYALYHAGFVGVPLDLAAIGDLFAVSRFMVVHANNLSTTAAPANWQPLLMSLQCGCPLRSPSSYAPMQYQIGPRDTYWIVSTTKLHNLTQYQIVERMNPMLVPTDLDVGTMVTFPAFCQCPVTANNATALITYVMQPGDTYASVAAAFSVAYPYLCNIRQVINLTICTRLLMS

SEQ ID NO: 79872 - protein, 255 aa, Zea mays
  Coding DNA Sequence Number=SeqID_38093
  Pfam annotation: Domain name=SlyX; Domain location=116-200; Score= -7.9; E_value=0.051; Accession=PF04102.3; Description=SlyX
MTSHGSSDDGNALSHTNGLAREGFPRILWEAGVRWTMSPLDTGLRIQSRRLLCTGQTAHLTVRCMNALYRLQVMRGEAMSHLMALLEATKITLDNREELVVDLSTEMVEKYLQVEQLSNEIQELEELVGTRENTIEVLEDQLINTQQQLAEANEHLDMHHQEIQDMEANADVDIEGGEEPASSLDTTGSGRPPSPESSHYRKRLNFRGPKTHENKPKPTKIAAENKFDENRLLSSLNVDVRVGLHIQDLLVMHIQ

SEQ ID NO: 79873 - protein, 236 aa, Zea mays
  Coding DNA Sequence Number=SeqID_38094
  Pfam annotation: Domain name=SlyX; Domain location=116-200; Score= -7.9; E_value=0.051; Accession=PF04102.3; Description=SlyX
MTSHGSSDDGNALSHTNGLAREGFPRILWEAGVRWTMSPLDTGLRIQSRRLLCTGQTAHLTVRCMNALYRLQVMRGEAMSHLMALLEATKITLDNREELVVDLSTEMVEKYLQVEQLSNEIQELEELVGTRENTIEVLEDQLINTQQQLAEANEHLDMHHQEIQDMEANADVDIEGGEEPASSLDTTGSGRPPSPESSHYRKRLNFRGPKTHENKPKPTKIAAENKFDENRLFSSA

SEQ ID NO: 79874 - protein, 121 aa, Zea mays
  Coding DNA Sequence Number=SeqID_38095
  Subcellular localization annotation: CTP_CleavageSite=53; ConfidenceScore=5.67e-01
MASANVRGTGGGFTVGRTRPFINQFQRGRGLKRSNSPPNASPATPEGPAPIPTGSAEMGFASIPAVTEPPKSLGPPTVVLVLWTSDNPAGAPDHLTSSVSIFLTFPKSVSPITQTLQYIGG

SEQ ID NO: 79875 - protein, 109 aa, Zea mays
  Coding DNA Sequence Number=SeqID_38096
  Subcellular localization annotation: CTP_CleavageSite=7; ConfidenceScore=5.08e-01
MGFAPIPAVTEPPKSLGPPTVVLLQWTSDNPAGAPDHLTSSVSIFFTFPKSVSPVTQTLQYIGEHLEEELGIEVEGEPVPPSKPSPTEVVTEGPPEGAPLDLLLTAISL

SEQ ID NO: 79876 - protein, 247 aa, Zea mays
  Coding DNA Sequence Number=SeqID_38097
  Homolog annotation: Hit_ID=Q3MV21; Match level="QueryCoverage=31%, HitCoverage=12%, E-value=1e-07, Identity=40%"; Hit description =Fructan exohydrolase
MSALQKVVAAVVHDVNAEGWDRGLEGLRRPRSKWSSTSSTEILGASTAPLFSSSRDNGGPAFETDFADQLKNFSKMGHGVSSGGVLLKSSGWHTPVVPQIRTNASIGTVVDNNICHPTEFDFFLCIHAGAKDRLQERLRKSKCLGLEEAAKNKGFDLGNVDAMQTDMEVVFEVLKSLEDVEELDPEWLHDPHKLHTCVEKDTSLSDSCGVDPFGLVVMAPEGMQSRSRSPYSSGSDQDLSFSIYASL

SEQ ID NO: 79877 - protein, 118 aa, Zea mays
  Coding DNA Sequence Number=SeqID_38098
  Homolog annotation: Hit_ID=Q3MV21; Match level="QueryCoverage=64%, HitCoverage=12%, E-value=5e-08, Identity=40%"; Hit description =Fructan exohydrolase
MKDRLQERLRKSKCLGLEEAAKNKGFDLGNVDAMQTDMEVVFEVLKSLEDVEELDPEWLHDPHKLHTCVEKDTSLSDSCGVDPFGLVVMAPEGMQSRSRSPYSSGSDQDLSFSIYASL

SEQ ID NO: 79878 - protein, 145 aa, Zea mays
  Coding DNA Sequence Number=SeqID_38099
  Gene Ontology: Mol. function=nucleic acid binding
  Homolog annotation: Hit_ID=Q53QK3; Match level="QueryCoverage=70%, HitCoverage=10%, E-value=2e-30, Identity=67%"; Hit description=PWWP domain, putative
MRGKRILPVFSWKNKMVGLASCGEMLWQLSVAACGLQQREKITMWSSAERENLVLHFSRPCISPTKCDLINIFSQYGHVNEVKPDVANSASSAQVIFKRRMDAEAAFAGAGKINALGPALVSFRLTDFPASASGNKASHVGSKSE

SEQ ID NO: 79879 - protein, 140 aa, Zea mays
  Coding DNA Sequence Number=SeqID_38100
  Gene Ontology: Mol. function=nucleic acid binding
  Homolog annotation: Hit_ID=Q53QK3; Match level="QueryCoverage=64%, HitCoverage=8%, E-value=1e-28, Identity=72%"; Hit description=PWWP domain, putative
MWSSAEREHLVLHFSRPCISPTKCDLINIFSQYGHVNEVKPDVANSASSAQVIFKRRMDAEAAFAGARKINALGPALVSFRLTDFPASASGNKASHVGSKKYGDLFLLCMPSGAITTSPNGPTPHESDKEVSFSTHACSL

SEQ ID NO: 79880 - protein, 164 aa, Zea mays
  Coding DNA Sequence Number=SeqID_38101
  Homolog annotation: Hit_ID=Q2L8W8; Match level="QueryCoverage=68%, HitCoverage=37%, E-value=6e-29, Identity=54%"; Hit description=MTERF- like protein
MRSAATVTPAVATTSLALSLHLPELPSQVKDKILSLELMGVDYGRALEQSPALRDAAPESIHAVVSFLQSRGLQFKDLGRVFGMCTSVLTANVRADLCPVFAFLSADLGVPESAHWRVVIKCPRVLACSVRDQLRPALIYLRRLGFRVGRRLGWTAVGDVPHQH

SEQ ID NO: 79881 - protein, 360 aa, Zea mays
  Coding DNA Sequence Number=SeqID_38102
  Homolog annotation: Hit_ID=Q2L8W8; Match level="QueryCoverage=31%, HitCoverage=37%, E-value=3e-28, Identity=54%"; Hit description=MTERF- like protein
MAATTAEERGELVGEKALRVMRMAIALGGIPFLKKEKSNRRSRQYCAPSGPPQRIKKVNFQNQCSGIETPRAWPSKNIKCGDHESVSRGTGVTVGVTEGGLAVVVSVSAQKQRANRQSSFGPTCRLVSSPEAGPGATVGTLNQWYPLLQCEGVESMRLPLATWQTAPDPTTTSASTDRGPETGPRPPCVGSSSGGDPMLPRGQLPVTAATVTPAVATTSLALSLHLPELPSQVKDKILSLELMGVDYGRALEQSPALRDAAPESIHAVVSFLQSRGLQFKDLGRVFGMCTSVLTANVRADLCPVFAFLSADLGVPESAHWRVVIKCPRVLACSVRDQLRPALIYLRRLGFRVGRRLGWTA

SEQ ID NO: 79882 - protein, 112 aa, Zea mays
  Coding DNA Sequence Number=SeqID_38103
MCFCYRELGHRSFECSQHKRSVWHMISSGKVAASSADASRPETEISVWRRINLPEPSAVSGDDPRESHRPFAEANWRRLTSSSVLKAKKLDGSDPNPQVIEVDGDDIGRVQQ

SEQ ID NO: 79883 - protein, 583 aa, Zea mays
  Coding DNA Sequence Number=SeqID_38104
  Pfam annotation: Domain name=zf-CCHC; Domain location=81-98; Score =19.1; E_value=0.00071; Accession=PF00098.13; Description=Zinc knuckle
  Subcellular localization annotation: CTP_CleavageSite=12; ConfidenceScore=5.20e-01
KVTTPAPIARPVCSQEGCSSSVQKRSVYGLSSTTSGMAQIARSAEKLVGGWQLVESKKSKRHRLKLERQRQRRPVPEDLAGRCFNCLSQDHFVFQCTQKTSLLKRPVWQRIKSGKVAVNNIVASRPETKISVWRRINLPEPMLKAKKLQMTRAEDDLQKAVVITFISDRERVPVEEIAELIAPRLELEERAATFTITCRKWSRFLNSRGAVLPTLLDIELQDTLELKDVAVYRCSAWCLDTSLVTASRELWIVEPPFAVDGVSSGRRTLMDPIHITFSSAPRQDGSDPNLRAITSGDDVHERLGPRDENMQQRNISSEMAVSDLMRTLESDGGTLSPRLIEKTDDKVLTSPVKAKQLKVYSRQRLKNVLTLEGVGAPNPVTGFLPPPQTWQLLTRFRLRILSDVDAVLAIPSGTLPSSLSDVAATHAAPSEAIALDVDAELVGPSEDDLPATQDSVEISAQEQFISRLSNQITRVLPVPKSVRRQSSTPLAVPRRSRRVAGVGVEFKIQDWGKRSKKQAMVALNIIKDNEEFSRQALDDYAKLFKHTLSRSHVQALAALFGWSIPINLEYDNGTGDITAASIF

SEQ ID NO: 79884 - protein, 228 aa, Zea mays
  Coding DNA Sequence Number=SeqID_38105
  Homolog annotation: Hit_ID=Q6L5H7; Match level="QueryCoverage=41%, HitCoverage=4%, E-value=4e-09, Identity=36%"; Hit description =Putative myosin heavy chain
MRRWWAALKNIIEFFISIRIRLEDYLILLFFTHRLEESTADKDSLLATERHENSETKKELAGSQKKIAELLTEVQDTGAYIAELEGSEQNASTLKLLTEAQLRIEELIKKLEGSNRKSDSLLDTITRIFHFVHASVSSQNCKSSNDGYGVLCPVFEHYMVDLADYDTWLADEAQTTQILLGSMKVEFAIDLFALPSTQEMWERAQALYQPSSTTLYISTLELASSLHQ

SEQ ID NO: 79885 - protein, 299 aa, Zea mays
  Coding DNA Sequence Number=SeqID_38106
MLALGDSGPVPLLMAGQQGEVAPPCAEVNRHQGCLEHLSVHLSHSPSCKEATSSSLYAHSCRRLEPCGQRQLLLMLHCCLDLQQPCSTIRSEACIFARSALMLVHKSPIDGADGHADVQDVVTKLAGDAAHVDGDAGCQDGVTKVTCSAVHGDGDADCQDDDMKLAAEAMGSDRNPSSLIPDVMVARSVRDWRGGWERRTSEELSLKLLEFQTKTPEELVEAKNTEGIDEKVLLMKRASELQGGDVESGAARLVESLCPLPHLLSGGQSKEIYGKFHLHTAKKNLSRLSLISKPSIIVG

SEQ ID NO: 79886 - protein, 133 aa, Zea mays
  Coding DNA Sequence Number=SeqID_38107
  Gene Ontology: Mol. function=DNA-directed DNA polymerase activity; Biological process=nucleobase, nucleoside, nucleotide and nucleic acid metabolic process
  Homolog annotation: Hit_ID=Q6K777; Match level="QueryCoverage=70%, HitCoverage=4%, E-value=4e-46, Identity=93%"; Hit description =Putative DNA polymerase epsilon catalytic subunit protein isoform b
MQAHKRVVDKPITEVREAGICMRENSFYVDTVRSFRDRRYEYKGLNKTWKGKLAEAKASGNSMKIQEAQDMVVLYDSLQLAHKCILNSFYGYVMRKYVKFKDNMVFICIHPLVFVDASILGFQLSDVPSLWIG

SEQ ID NO: 79887 - protein, 482 aa, Zea mays
  Coding DNA Sequence Number=SeqID_38108
  Homolog annotation: Hit_ID=Q6K777; Match level="QueryCoverage=33%, HitCoverage=10%, E-value=9e-28, Identity=64%"; Hit description =Putative DNA polymerase epsilon catalytic subunit protein isoform b
MDYQIPSQISTILYESNEGVHHAPAPTVESCNFSRVGPAASRDPSYPTKPVLGFCRRLPSRDGSPLPPAAPSCLAPTAAPGRGRRAIGLREAKHKRRGAPRSEVAAALRRSAVGVLRGDRDAEEQQSSPSGEERFDWLDKWYPLAPVCDLDPHVPHGKTVLGLSIVDWYDILVENLMDPAHAPYAHKGIMRGIRKKEDPGRFSWTLLMSPLHGCSYATMQAHKRVVDKPITEVREAEICMSENSFYVDTVRRFRDRRYEYKGLNETWKGKLAEAKASGNSMKIQKAQGSKMVLYGNGWCCNIYWCKDYPKCPITCRKIGRPLELDTDGICERSIEFEVDGPYKAMILHASKEEGILIKKRYAVFNEDGTLAELKGFEIKRRGFTFNPRAVAFKIQKRMTVVLAAGGGIGNILATSDRDFSCSPSAAPSCPIASVRTRIHGRVCECPIAICEVCYMLDDGCKYLDGFKGGSRHKCEGTLSAYY

SEQ ID NO: 79888 - protein, 59 aa, Zea mays
  Coding DNA Sequence Number=SeqID_38109
MWLKELRLSTLTMVKGETDLRGKRLLSPRQFALWSTVNVKDMNGIASENKDQHSTFTPT

SEQ ID NO: 79889 - protein, 70 aa, Zea mays
  Coding DNA Sequence Number=SeqID_38110
MWLKELRLSTLTMVKGETDLRGKRLPSPRQFALWIIVNVKDMNLCPSWPSSEDYYILRGIMLQRMNVINR

SEQ ID NO: 79890 - protein, 79 aa, Zea mays
  Coding DNA Sequence Number=SeqID_38111
MTLDGVGTNSSTKSKGITSVESTIETKATAYHPRELHIIKLRGEKSRKGPKYKPKTKGKEKEEETCPATELNHAGLKTK

SEQ ID NO: 79891 - protein, 127 aa, Zea mays
  Coding DNA Sequence Number=SeqID_38112
MTLGDVGTDSSIKSKGITSVESTIETKAIAYHPTTPRLLLSFTDTAAPALDELYRRSGDQPETEQQADEEDEEVEVVENATGMAAARSLGRRQRRPAAARRRTRRRWRTRRGWRRTDGDGAGDGTRF

SEQ ID NO: 79892 - protein, 73 aa, Zea mays
  Coding DNA Sequence Number=SeqID_38113
MTLGDVGTDSSIKSKGITSVESTIETKATAYHPRNGAAKMRRVRCRSAKLTLLHRDKSWSAHDNEAMRDGSES

SEQ ID NO: 79893 - protein, 183 aa, Zea mays
  Coding DNA Sequence Number=SeqID_38114
MEEDDCKERPGRLRSYARTLRELGRQGDELVRTSMTLGDVGTDSSIKSKGITSVESIIETKATAYHPTPPKGRGAYKKYVDAFSERQTLNKNCGGALCTGADGPRAGAGRSAAWCEARWCSLRKGGLSAAWGRTVRGLVRGWDFCLTAGRSAPWGRTVRTYAGTAEDRRRRLDLAPGRDPVGE

SEQ ID NO: 79894 - protein, 406 aa, Zea mays
  Coding DNA Sequence Number=SeqID_38115
MTLGDVGTDSSIKSKGITSVESIIETKATAYHPTPPKGRGAYVEHQIERGRSGPEAGRSAVRTVGLPEPRHHLGSLLPDGVSPGSEIQAPSAIFRRPCVRADRPAPGRGPSGRQAEVPTAHQAVDRPAPGRGQSALAQRAPPRLAPGRGPSGPCARTVRPCAEGTATVLVECLALQKGVNILFGVEHQIERGRSGPEARTVGLPEPRHHLGSLLPDGVSPGSEIQAPSAIFRRPCVRADRPAPGRGPSGRQAEVPTAHQAADSPPLRREHHRASHQAADRPAPARGPSAPVQRAPPRFLLSVWRSEKASTYFLATPLGTTHIDLSNRPSMAGSKDSSEVFTSNIITPTWEALPAEEQLLFEERQEQLIQEAKAKFLADFKVDRNNKVVRQRATDLASLRPTTITPN

SEQ ID NO: 79895 - protein, 101 aa, Zea mays
  Coding DNA Sequence Number=SeqID_38116
MATSGDSSVAVALEAQAQTMAAQARLLKQICDRLDAQDRHWETLEKTVAGNIASIGTLATKLQEVEVPAAVRADMARSLSHQVETQVGEFQSLTWERIDAV

SEQ ID NO: 79896 - protein, 218 aa, Zea mays
  Coding DNA Sequence Number=SeqID_38117
MASSGDSSIAVALEAQAQTMAAQARLLKQICDRLDAQDRHWETLEKTVAGNIASIGTLATKLQEVEVPAAVRADMARSLSHQVETQVGEFQSLTWERIDAVDEALSGRVANLESATAVLESWRPYVERSVGVAQASVESLRAEVARMSEPWGRPHHASPPRRPDASMPYIPPVARPSAPRMNVDAPRGHHDAYHHREEGPGYPYTHGLLPHNGMNAGP

SEQ ID NO: 79897 - protein, 85 aa, Zea mays
  Coding DNA Sequence Number=SeqID_38118
MTEDPLTGHMPRHGIHFSKHFCKTESLIIEKPYLDSLNLHTLESLFFSRVRKRQIFVASALWWCQKKNTRNEVREERILHIELFV

SEQ ID NO: 79898 - protein, 85 aa, Zea mays
  Coding DNA Sequence Number=SeqID_38119
MTEDPLTGHMPRHGIHFSKHFCKTESLIIEKPYLDSLNQHTLDSLFFSRVRKRQIFVASALWWCQKKNTRNEVREERILHIELFV

SEQ ID NO: 79899 - protein, 549 aa, Zea mays
  Coding DNA Sequence Number=SeqID_38120
  Homolog annotation: Hit_ID=Q6QP51; Match level="QueryCoverage=31%, HitCoverage=91%, E-value=7e-26, Identity=62%"; Hit description =Putative growth-regulating factor 1
MSERDLERQGRPSRGTPTPPGYGYLTHHLPRKASAAIENKHTYLGNELPPDQKSCETTNSKRLTGDHCTNSDNDFRLRRLDSSNDCLRANATVKSPSPLSPARGREQSIKAKELEVRPQVALTVSSAEATPFAVGGLTCGGHHLSTDDSGHLRTNAAPANGGRPSAHKEVLTPILATGARTRLSKNTEATAVAYDVLCDPPVRPAAREGPWTWPTSVRRDRRPCGGRTATPRPGSRWQFASSVRLVDALLPRMLEEEAGHQPMRKAGHQLDLPSSPARMMNILEAEGKGEAMARLALPHHKAGGHHSGSPHSHPKRHGQSLCRRAPGFPPYDTGARSHMTYELTRNAKRANHRTRSMDRERGYFERVLHSEGNGPRALLLIRGLKVAPCGVRQPPQSTRAPSPLLIRGSKAGPSDGFDSRPRACRVRDDPGYVRYMAKAQATLSRYPKTFLRPAGTICNGIPPEGGTEPSDPIKWVRVQRITRSLGRNRELRLARPQASTSASASGEASASGGVTTSPDLSLGLGRNLRLARPRPRTDYAIGDTSLPYT

SEQ ID NO: 79900 - protein, 295 aa, Zea mays
  Coding DNA Sequence Number=SeqID_38121
MLLRLRHRQRPRLSGKYHYIPLQTGPQLHSRRNELPPDQKSCETTNSKRLTGDHCTNSDNDFRLRRLDSSNDCLRANATVKSPSPLSPARGREQSIKAKELEVRPQVALTVSSAEATPFAVGGLTCGGHHLSTDDSGHLRTNAAPANGGRPSAHKEVLTPILATGARTRLSKNTEATAVAYDVLCDPPVRPAAREGPWTWPTSVRRDRRPCGGRTATPRPGSRWQFASSVRLVDALLPRMLEEEAGHQPMRKAGHQLDLPSSPARMMNILEAEGKGEAMARLALPHHKAGGHHSG

SEQ ID NO: 79901 - protein, 140 aa, Zea mays
  Coding DNA Sequence Number=SeqID_38122
MGKPVPSLLMFLLSRGGVPLDSPTQWQDGRPSHSSNHVLQRTCKNCATSKDEYTNTQLDLPGALRPHTHQPSPSIPRQQIRAHRLGVQCLTDPDYRRAVTALVPTITGMGDHVSGRVRGKVYCQVQSGFSNIMLKEEKLS

SEQ ID NO: 79902 - protein, 103 aa, Zea mays
  Coding DNA Sequence Number=SeqID_38123
  Subcellular localization annotation: CTP_CleavageSite=45; ConfidenceScore=5.06e-01
MGKPVPSLLMFLLSRGGVPLDSPTRWQDGRPSHSSNHVLQRTCKNCATSKAEYTNTQLDLPVTALVPTITGMGDHVSGRVRGKVYCQVQSGFSNIMLKEEKLS

SEQ ID NO: 79903 - protein, 68 aa, Zea mays
  Coding DNA Sequence Number=SeqID_38124
MENAEVHILHLHTAFRNRVHRWKRCGLPNGERFQHRIINNVKNFAHTAYAHGNVLSGKMERTETNDRG

SEQ ID NO: 79904 - protein, 91 aa, Zea mays
  Coding DNA Sequence Number=SeqID_38125
MENAEVHILHLHTAFRDRVHRWKRCGLPNGERFQHRIINNVKNFAHTAYAHGNVLSGKMEKTETNDRDVCLLKRSPYIYTCAQRALNPWIK

SEQ ID NO: 79905 - protein, 79 aa, Zea mays
  Coding DNA Sequence Number=SeqID_38126
MENAEVHILHLHTAFRDRVHRWKRCGLPNGERFQHRIINNMKNFAHTAYAHGNAAKPKREAAWAPGGAARRGQRPLKPV

SEQ ID NO: 79906 - protein, 240 aa, Zea mays
  Coding DNA Sequence Number=SeqID_38127
MAGEDDAASRGINSASRLPTTGSDGPDDHGRRWRWRTTSNCRCSGRRRRWCLQIDVHRSGCRRSHVNHRHRWRRGCSGESTLHHRQRNHRYPSMDNAEVHILHLHTAFRDRVHRWKRCGLPNGERFQHRIINNMKNFAHTAYAHGNVRLIWFEVDRVRPASCRLSSVSMHPPTRSVSASSRRRQMDTAARTAGGRADGLGQRTAGGCSHADARKVHGVRSVDGAWLVQEQCGNGKGRKIL

SEQ ID NO: 79907 - protein, 254 aa, Zea mays
  Coding DNA Sequence Number=SeqID_38128
  Homolog annotation: Hit_ID=Q8MW53; Match level="QueryCoverage=54%, HitCoverage=15%, E-value=6e-07, Identity=34%"; Hit description =Precollagen-D
  Subcellular localization annotation: CTP_CleavageSite=35; ConfidenceScore=5.19e-01
MDVDLEAPPPPPPTAAAVARRSPSPPAPVVVGTIVARRGQPARAVDAPRGRIIFTGHHPRGWPHLPPPIGGPNGPRPGRHVGRLGGGGWGTARRTRRERALRSAAGPALAREKPRRARAAPEHGRERPPASRRAHRPRRGSEWIVWPPWRRSARLPNRATSGGTRRGPPRRARRGLLRLQILGAHGTRPARRTGELQALGLASTEHRRGAETGAGGPAGPFSPWRDSSLLEPGGGWEHPAPWRRLAIAPVGDGG

SEQ ID NO: 79908 - protein, 61 aa, Zea mays
  Coding DNA Sequence Number=SeqID_38129
MESINTYHGVKRLKHTLESLFLSRVRKRQTFVASAPRWYQMRKKKTEVREDSVLHLGSFVY

SEQ ID NO: 79909 - protein, 61 aa, Zea mays
  Coding DNA Sequence Number=SeqID_38130
MESINTYHGIKRLKHTLESLFLSRVRKRQTFVASAPRWYQMRKKKTEVREDSVLHLGSFVY

SEQ ID NO: 79910 - protein, 242 aa, Zea mays
  Coding DNA Sequence Number=SeqID_38131
MDSCPQTIIILLSKWIQPIPDLARVLEKSLDFYVAELPELFQLKCPSPALEARPHLNGNKPSIPRIWSDTATDRIKYHNLTRRSGLTALAYNAPLTPTGRRAVAALVPTITGMGDLVSGRVRGKVCGQVHSGTRLTDLPYFSVMHKTGACLPKQWQAGPLVQARVLDLGLPPEQLLAPARGCTLRQQDYSLANAMNIGLSLAILACFKNLRLKETKGWLFSYAFLKFHVKKALSTTSLFEKC

SEQ ID NO: 79911 - protein, 117 aa, Zea mays
  Coding DNA Sequence Number=SeqID_38132
MKAKSHHQQIILRSTCKNYATSKAEYTNTQLDLPGYNGSSSLISCEKQTIRIEFLSLQVTALVPTITGMGDHVSGRVRGKVYCQVQSDHASPWTRVHRPSPFCYQSGYNQFLTSREC

SEQ ID NO: 79912 - protein, 184 aa, Zea mays
  Coding DNA Sequence Number=SeqID_38133
MANRPLVTSNADRHIDVTAKASPTSYDPSPKLYCHRSMGMRYLRDKIGIRIKRADTCVKRLKVLSTTEKYDGVSHSKYGGYKCGHCTVAVGARGGGKGGGAYRWRDSSGKMVEDVGAVETVTSMYGLSSRMAGVGWSTSAGGELVGGEGSGLTRALYGALGKLTEARDRAEIGWSGLATATECS

SEQ ID NO: 79913 - protein, 136 aa, Zea mays
  Coding DNA Sequence Number=SeqID_38134
MTTLSAASCSTSCPGGKACTGVLPLMPERVSEQPAAELARALKNHPRTRHTSLHACPRYLDPILSSSELYTAHQGTRALGRRGQATPAHLRSISCLDKLPQSPVELPEARNRTLHRRRSSSTIAGVVFPVGARGHD

SEQ ID NO: 79914 - protein, 124 aa, Zea mays
  Coding DNA Sequence Number=SeqID_38135
MPKLYQSNSSHWYRCANSTSIGLISYYRREMLLVEGITQCAAWHGRTVCQQTQQARNLLDDLDAACQRMGRDALNAERARRLSALWQVARPFLNKCRGCTALRQAWPDGLCHGPQAVRLRLSGK

SEQ ID NO: 79915 - protein, 156 aa, Zea mays
  Coding DNA Sequence Number=SeqID_38136
MASSKDSTKVSLSNIMKLTLEKRKETKEKYLAHLKVDRYQRIIQQGEFEMASLLPATHAPNEMLLVEGITQCAAWHGRTVCQQTQQARNLLDDLDAACQRMGRDALNAERARRLSALWQVARPFLNKCRGCTALRQAWPDGLCHGPQAVRLRLSGK

SEQ ID NO: 79916 - protein, 223 aa, Zea mays
  Coding DNA Sequence Number=SeqID_38137
  Gene Ontology: Mol. function=helicase activity; Biological process =protein amino acid phosphorylation
  Homolog annotation: Hit_ID=Q1EPC6; Match level="QueryCoverage=90%, HitCoverage=12%, E-value=5e-80, Identity=68%"; Hit description=DNA helicase homolog, putative
  Pfam annotation: Domain name=DUF889; Domain location=96-223; Score =25.8; E_value=3e-13; Accession=PF05970.5; Description=Eukaryotic protein of unknown function (DUF889)
MGKDIKTFPLPHIINAYDDAIGRTTHSRFKIPLTINDGVVCSFTKQSGTVELLRKASLIIWDKASMTKRQVVEALDNSMRDIMGQPRLPLGGKTIVLGGDFRQVLHVVRKGSRAQVVASSLRMSYLWESMSHLKLVNNMRAKNDPWFLKYLLRVGGGTEDTNSDDDIRLPDEVCVPYSGSDSDLDNLIDFVFPNLNKNMSDLTYITSRAILSTLNDWVDMINV

SEQ ID NO: 79917 - protein, 139 aa, Zea mays
  Coding DNA Sequence Number=SeqID_38138
  Gene Ontology: Mol. function=helicase activity; Biological process =protein amino acid phosphorylation
  Homolog annotation: Hit_ID=Q1EPC6; Match level="QueryCoverage=97%, HitCoverage=8%, E-value=4e-52, Identity=68%"; Hit description=DNA helicase homolog, putative
  Pfam annotation: Domain name=DUF889; Domain location=12-139; Score =25.8; E_value=3e-13; Accession=PF05970.5; Description=Eukaryotic protein of unknown function (DUF889)
MALLPLGGKTIVLGGDFRQVLHVVRKGSRAQVVASSLRMSYLWESMSHLKLVNNMRAKNDPWFLKYLLRVGGGTEDTNSDDDIRLPDEVCVPYSGSDSDLDNLIDFVFPNLNKNMSDLTYITSRAILSTLNDWVDMINV

SEQ ID NO: 79918 - protein, 134 aa, Zea mays
  Coding DNA Sequence Number=SeqID_38139
  Gene Ontology: Mol. function=transcription regulator activity; Cellular component=nucleus; Biological process=regulation of transcription
  Homolog annotation: Hit_ID=Q7XB58; Match level="QueryCoverage=72%, HitCoverage=24%, E-value=8e-50, Identity=63%"; Hit description =Putative TATA box binding protein-associated factor
  Pfam annotation: Domain name=WD40; Domain location=37-75; Score=50.1; E_value=7.3e-12; Accession=PF00400.22; Description=WD domain, G-beta repeat
  Pfam annotation: Domain name=WD40; Domain location=79-133; Score=0.5; E_value=32; Accession=PF00400.22; Description=WD domain, G-beta repeat
  Pfam module annotation: Pfam domain module=WD40::WD40; Domain location=37-75::79-133
MAGHLSDVDCVQWHVNCNYIATGSSDKTVRLWDVQTGECIRMFIGHRSMVLSLAMSPDGRYMASGDEDGTIMIWDLSTGRCVSPLLGHSSCVRTLAFSSPQVSFYLNASCMSLPKEQVFIVVKGKPGLISWFAI

SEQ ID NO: 79919 - protein, 111 aa, Zea mays
  Coding DNA Sequence Number=SeqID_38140
  Gene Ontology: Mol. function=transcription regulator activity; Cellular component=nucleus; Biological process=regulation of transcription
  Homolog annotation: Hit_ID=Q7XB58; Match level="QueryCoverage=97%, HitCoverage=19%, E-value=2e-23, Identity=54%"; Hit description =Putative TATA box binding protein-associated factor
MSPDGRYMASGDEDGTIMIWDLSTGRCVSPLLGHSSCVWTLAFSSPQVSFYLNASCMSLPKEQVFIAVKGKPGLISCKGSSSANRLRLLKSLPTKSAHVYSLRSIRKCLSG

SEQ ID NO: 79920 - protein, 330 aa, Zea mays
  Coding DNA Sequence Number=SeqID_38141
  Pfam annotation: Domain name=zf-GRF; Domain location=34-78; Score =9.8; E_value=0.002; Accession=PF06839.3; Description=GRF zinc finger
MYREALWQKRGRPRELYPDVSSKDAPVPPELPMPNCDCGRLAWVHQSQHPDMAARCYYLCGTLDGHQRCFFFQWIDGPDKFDSRYLLFVNWLSGKTSHERFKRWVPPPPNPPPMTDAEKEVATERRMDSPPRCDCGDRAVIDEDYDKQFCCPNIDYPYGWCKCRFREWLYGPLSHWLEPEVKEKRYMGWATEDVKFDPVLCKCGDEEMQLRELRRQRREIGSGVNYLADEAHARYVQDKMATVELMEEEDDDTSRLSELIALAEAGLHEEEEDDTSRLSELIALTEAGLRAQEEEDEFMSQAAAEVEAASYKKKSDEAEAEDELFSQAAD

SEQ ID NO: 79921 - protein, 187 aa, Zea mays
  Coding DNA Sequence Number=SeqID_38142
  Homolog annotation: Hit_ID=Q9ATW3; Match level="QueryCoverage=19%, HitCoverage=19%, E-value=1e-13, Identity=100%"; Hit description =Receptor-like kinase
MRQGVIQDLDYALRTKKGGLTPEEEKTLLAYNLLPGVYFIVGSILGTFAGLLGTHKGWGLGRTISLDKVQRTVGHLASNIIPFLWLYFESSFPKCYTMEVVVMLLSSGHTRGKRIIFCFCYCSYFSRIFVCLPFAVAALLLLAFCNSTRERAILMMQTAAGCRKVPPELPEPAFDINFACDGIQHRG

SEQ ID NO: 79922 - protein, 259 aa, Zea mays
  Coding DNA Sequence Number=SeqID_38143
  Subcellular localization annotation: CTP_CleavageSite=63; ConfidenceScore=5.59e-01
MPRKSPGIPSRWPCVPPLAAARSASPAQGALPRRCVSLRFRVVPLRLPLTRPASPDPEDLSVKLSSPRNGQWTVAPFHLSCGMEVLEVDSFVFLLFQNEQWTVAPFRLSCGMEVLEVCKLCMYTLDSTVLENDQQSTGQRKAHTGHSSFVFLLPRSSLLHSRTAIDPTTTSSERGLMAAQLRYMISHYFGTPPAPGKGVIQDLDYALRTKKGGLTPEEEKTLLAYNLLPGVYFIVGSVLGTFAGLLGTHKGCSLPQLSI

SEQ ID NO: 79923 - protein, 246 aa, Zea mays
  Coding DNA Sequence Number=SeqID_38144
  Gene Ontology: Mol. function=protein serine/threonine kinase activity; Biological process=protein amino acid phosphorylation
  Homolog annotation: Hit_ID=Q94KC3; Match level="QueryCoverage=64%, HitCoverage=28%, E-value=6e-43, Identity=57%"; Hit description=CaMK1
MGLCYGKSAAVQEPAVAEENNKADGAAAGRGDGPPASPAKVSRTPKQLKLSFYLPSPLPPSSYKGSPANSSVASTPARDGFKRPFLSPSPAKHIRALLARRHGSVKSISEGGEPDLGLDKSFGYSRHFAAKYDLGREVGRGHFGFTCAAKCKKGELKGEDVAVKVIPKAKAALEEILYQFEEKLQAERKEAARKQEELQAQLQAQHVALEENQSLLCQTPEEVKGMHTKFEETNALLRAVLKLQKD

SEQ ID NO: 79924 - protein, 224 aa, Zea mays
  Coding DNA Sequence Number=SeqID_38145
  Gene Ontology: Mol. function=protein serine/threonine kinase activity; Biological process=protein amino acid phosphorylation
  Homolog annotation: Hit_ID=Q94KC3; Match level="QueryCoverage=40%, HitCoverage=16%, E-value=7e-38, Identity=81%"; Hit description=CaMK1
MARRRARGDGPTSVAGEGVSDAQAAQVVLLLAEPRSRPPATRARRQNSSVASTPARDGFKRPFLSPSPAKHIRALLARRHGSVKSISEGGEPDLGLDKSFGYSRHFAAKYDLGREVGRGHFGFTCAAKCKKGELKGEDVAVKVIPKAKAALEEILYQFEEKLQAERKEAARKQEELQAQLQAQHVALEENQSLLCQTPEEVKGMHTKFEETNALLRAVLKLQKD

SEQ ID NO: 79925 - protein, 108 aa, Zea mays
  Coding DNA Sequence Number=SeqID_38146
MVRERRTQTNTMSKNTRDTRFIPRFGHTTKVPYFLVEAPTKSRVSFNPNPPFADHKAQLQLKKLNSAEVKFSWKAQLQLKKLNSAEVKFSWKAQLQLKKFSCFSTRTL

SEQ ID NO: 79926 - protein, 80 aa, Zea mays
  Coding DNA Sequence Number=SeqID_38147
MSKNTRDTRFIPRFGHTTKVPYFLVEAPTKSRLKKLNSAEVKFSWKAQLQLKKLNSAEVKFSWKAQLQLKKFSCFSTRTL

SEQ ID NO: 79927 - protein, 115 aa, Zea mays
  Coding DNA Sequence Number=SeqID_38148
  Subcellular localization annotation: CTP_CleavageSite=26; ConfidenceScore=5.04e-01
MSKNTRDTRFIPRFGHTTKVPYFLVEAPTKSRVSFNPNPPFADHKAQLQLKKLNSAEVKFSWKAQLQLKKLNSAEVKFSWKAQLQLKKLNSAEVKFSWKAQLQLKKFSCFSTRTL

SEQ ID NO: 79928 - protein, 61 aa, Zea mays
  Coding DNA Sequence Number=SeqID_38149
MSKNTRDTRFIPRFGHTTKVSYFLVEAPTKSRVSFNPNPPFGDHKAQQQLKKLNSAEVQLS

SEQ ID NO: 79929 - protein, 97 aa, Zea mays
  Coding DNA Sequence Number=SeqID_38150
  Subcellular localization annotation: CTP_CleavageSite=26; ConfidenceScore=5.04e-01
MSKNTRDTRFIPRFGHTTKVPYFLVEAPTKSRVSFNPNPPFADHKAQLQLKKLNSAEVKFSWKAQLQLKKLNSAEVKFSWKAQLQLKKFSCFSTRTL

SEQ ID NO: 79930 - protein, 457 aa, Zea mays
  Coding DNA Sequence Number=SeqID_38151
MSSRSLMHRVFPPSEPPDGEHPQSFRLVIGGMQLRGSWYLSAIVRLQGFSSGSPAASPRRRSPKTVTTSSWVGRSKPGCDLGPALSFKDLQHPCWGGGRAEPELYLPRGFVGQPLPQHSRERALTGLAGGSDSDNAGPIGGGHRQLQRVGLAGSADSAPGAPSRREGGCRAARTGGPPKTSRAARAAFVFWGCPAFAPVRRLCAEVSAPLVREDLSGDLPVGRWLLSLVLRWRRLEKSSSPTGSPPPSALRASGSLYLSSPLERRRGRGHCCSGARPEAIAAAIRPPGAGVVVAAAGAGDGGRPGALSPRGPPQCGGLNPCPLFDEPKPEVAASARTEAELARKEDLVGQSLAGSSTGGTDAGVELPKLRAGLMSLGDGWLRLQGGRPSRLLEPDSWRRPWRRWPGHGADVVLRSGDPPTASPSEARPDLAEGVDDAEGAAAPFNCQDPSLQDRVIL

SEQ ID NO: 79931 - protein, 457 aa, Zea mays
  Coding DNA Sequence Number=SeqID_38152
MSSRSLMHRVFPPSEPPDGEHPQSFRLVIGGMQLRGSWYLSAIVRLQGFSSGSPAASPRRRSPKTVTTSSWVGRSKPGCDLGPALSFKDLQHPCWGGGRAEPELYLPRGFVGQPLPQHSRERALTGLAGGSDSDNAGPIGGGHRQLQRVGLAGSADSAPGAPSRREGGCRAARTGGPPKTSRAARAAFVFWGCPAFAPVRRLCAEVSAPLVREDLSGDLPVGRWLLSLVLRWRRLEKSSSPTGSPPPSALRASGSLYLSSPLERRRGRGHCCSGARPEAIAAAFDHPERGVVVAAAGAGDGGRPGALSPRGPPQCGGLNPCPLFDEPKPEVAASARTEAELARKEDLVGQSLAGSSTGGTDAGVELPKLRAGLMSLGDGWLRLQGGRPSRLLEPDSWRRPWRRWPGHGADVVLRSGDPPTASPSEARPDLAEGVDDAEGAAAPFNCQDPSLQDRVIL

SEQ ID NO: 79932 - protein, 141 aa, Zea mays
  Coding DNA Sequence Number=SeqID_38153
MAVAAAAPPWASLGPDTTPLLDKQLALELPHNGGVAHGDGDVVNEDDVMKFGVVPGDGHADVQDVVTKLTGDVAHGDRDAGCQDGVTKVACGATHGDGDVGCQDGVTKVTCGAVHGDGDAGCHDDAAKLAAEAMGSGRNPR

SEQ ID NO: 79933 - protein, 72 aa, Zea mays
  Coding DNA Sequence Number=SeqID_38154
MTNRIIAIRFRASRNRRSSFGNQEIKLFEFYEDEDPEHLFGGDKDDVYDYGNGKEGVEVDLQEFQDVDEFED

SEQ ID NO: 79934 - protein, 99 aa, Zea mays
  Coding DNA Sequence Number=SeqID_38155
MTNRIIAIRFQASRNRRSSFGDQEIKLFQFYEDEDPEHMFGEGKNWGVVRFAVVLLMGLGVCGSLCQDGDKDDVYDYINGKEGIEVDLQEFQDVDEFED

SEQ ID NO: 79935 - protein, 133 aa, Zea mays
  Coding DNA Sequence Number=SeqID_38156
  Homolog annotation: Hit_ID=Q8H6I2; Match level="QueryCoverage=94%, HitCoverage=51%, E-value=3e-16, Identity=45%"; Hit description =Putative MURBZC
MESAAELCAQNFSAAVDAARDTLSASAATCVVAGDLCATASLGNHVVSTLDVLESAVEAEKVLCVLINKRVQQSFVLRRHWPNTMRHQAEGIWLTASGCLLLCCSVHILSVHLADGLFVFPVQQKVSSYACPW

SEQ ID NO: 79936 - protein, 99 aa, Zea mays
  Coding DNA Sequence Number=SeqID_38157
  Homolog annotation: Hit_ID=Q8H6I2; Match level="QueryCoverage=85%, HitCoverage=35%, E-value=2e-18, Identity=71%"; Hit description =Putative MURBZC
MESAAELCAQNFSAAVDAARDTLSASAATCVVAGDLCATASLGNHVVSTLDVLESAVEAEKVLCVLINKRVQQSFVLRRHWPNTMRNLSAVFRLVIHVR

SEQ ID NO: 79937 - protein, 58 aa, Zea mays
  Coding DNA Sequence Number=SeqID_38158
MARLSAHAPSAADLISAVGFRSHDNEQSEVPECVVGDLPEQPPGEGKCPLTHYVLHTL

SEQ ID NO: 79938 - protein, 76 aa, Zea mays
  Coding DNA Sequence Number=SeqID_38159
METAPSHPELRPEVRHLYPCPIFPIALCGRPISASPEFGHGDNEQSKVPECVVGDLPEQQPGEGKCPLTYYVLHTL

SEQ ID NO: 79939 - protein, 80 aa, Zea mays
  Coding DNA Sequence Number=SeqID_38160
MGFTPIPAVTEPSKILGPPTDVIVLRTSDSHASALKGSAEESPQLGVSRPYNKNQSESTRVREGSTTHKSTAIRTHTAKT

SEQ ID NO: 79940 - protein, 122 aa, Zea mays
  Coding DNA Sequence Number=SeqID_38161
MDESCTQLLSSDPMINLNTTVFFFLYSLPFPRNLHNLESLALTIRIKVKALDYGGYKCGHYTAIAEVSGALYVKACFWQTKPLSQTPGTLQDMVDGVTWPATLPPGWMVEWDAAPAGEEQEE

SEQ ID NO: 79941 - protein, 167 aa, Zea mays
  Coding DNA Sequence Number=SeqID_38162
  Homolog annotation: Hit_ID=Q8LPZ7; Match level="QueryCoverage=17%, HitCoverage=5%, E-value=5e-07, Identity=86%"; Hit description =Putative calcium dependent protein kinase
MDVTIREEVFSRHVNFRFKLLPLLADLKSLFQPFNYVSNHFGLVIADHLSTEEVEDIKDMFKTMDTDNDGIIQECRRSSSALPNTTRAAHPRDPPHAATAPAARGTHAAHRAPYRAAAGPPTMPATSSPTAPPPASPSRYRRATGTLSLSARKFLGNHRTTDNHLPL

SEQ ID NO: 79942 - protein, 1184 aa, Zea mays
  Coding DNA Sequence Number=SeqID_38163
  Homolog annotation: Hit_ID=Q8S9F0; Match level="QueryCoverage=43%, HitCoverage=94%, E-value=0.0, Identity=69%"; Hit description =Cytochrome P450
  Pfam annotation: Domain name=HSP70; Domain location=185-716; Score =495.7; E_value=5.2e-146; Accession=PF00012.10; Description=Hsp70 protein
  Pfam annotation: Domain name=MreB_Mbl; Domain location=263-536; Score= -224.8; E_value=0.0013; Accession=PF06723.3; Description=MreBMbl protein
  Pfam annotation: Domain name=Pkinase; Domain location=4-212; Score= -91.6; E_value=0.0042; Accession=PF00069.15; Description=Protein kinase domain
  Pfam annotation: Domain name=p450; Domain location=721-1181; Score =217.2; E_value=3.8e-62; Accession=PF00067.12; Description=Cytochrome P450
  Pfam module annotation: Pfam domain module=HSP70::MreB_Mbl::Pkinase::p 450; Domain location=185-716::263-536::4-212::721-1181
MGNCCRSPAAVVREDEACEDEGVVHLVMELYEGGKLFDRIVARGHYTERAAANVTRTIVEVVQLCQRHGVIHRDLKPENFLFANKDNSPLKAITSVSPSSSSLSLFQPINYVSNHFGLVIADHLSAEEVEDIKDMFKTMDTANDGIDKSSTSNLKIEALVLTRLVMVSHSPSVFHPYIKTLSAPILSAIRDRYYKVTVEALRTTAVDFKPYIGPIYNAILGRLANQDQDQEVKECAISCMSLVVSTFGDGLERELPACLPILVDRMGNEITRLTVVKDTAEAYLGKKINDAVVTVPAYFNDAQRQATKDAGVIAGLNVARIINEPTAAAIAYGLDKKGGEKNILVFDLGGGTFDVSILTIDNGVFEVLATNGDTHLGGEDFDQRIMEYFIKLIKKKYNKDINKDNRALGKLRREAERAKRALSNQHQVRVEIESLFDGTDFSEPLTHARFEELNNDLFRKTMGPAKKAMEDAGLEKSQIHEIVLVGGSTRIPKVQQLLKDYFNGKEPNKGVNHDEVVAFGAAVQGSILSGEGGDETKDILLLDVAPLTLGIETVGGVMTKLIPRNTVIPTKKSQVFTTYQDQQTICLHPVIANSPLRIDLSCVLDHVVSELTAFLRKSECRTICSTSSESPLGKLSAAMFLGALFAAVTTSAPAARSLLVYGVPGLVLLWQGGRLLSRLWREPRRLERALRAQGLRGTSYRFLTGDLREFGRLNKEAWARPPLPLGCHDIVPRVTPFLCGNVREHGKTCFSWFGPIPNVTITDPALVRDVLSNKFGHFGKPQFPALTKLLSDGLTSHEGEKWVRHRRILNPAFHLEKLRLMLPTFSACCEELVGRWAARCLGPDGGSCELDVWPELQALTGDVISRTAFGSSYLEGRRIFELQSEQAERFVGAIQKIVIPGYMYLPTKNNRRMRQINKEVNSILRGVVGKRMRAMAMREGGESTTGADDLLGLLLESNNTRHEGETGHGQQSALGMTIEDVIEECKLFYFAGMETTSVLLTWAMVLLSMHREWQDRAREEVTGLFGRDDNKPEYEGLSRLKTVNMILYETLRLYPPAVVFSRKAYKEMKVGGVTLPAGAIIEIPVLFIHHDPDTWGDDAHEFKPERFAEGVSRACNGASGAFIPFGWGPRTCIGQSFALLEAKMALCVILQRFEMELAPSYTHAPHTVMTLHPMHGAQIKLTAI

SEQ ID NO: 79943 - protein, 92 aa, Zea mays
  Coding DNA Sequence Number=SeqID_38164
  Gene Ontology: Mol. function=nucleoside-triphosphatase activity
  Homolog annotation: Hit_ID=Q7FMW4; Match level="QueryCoverage=76%, HitCoverage=4%, E-value=4e-30, Identity=91%"; Hit description =Pleiotropic drug resistance protein 15
MSPIGKKYWTGHVTSKKDQEQYWIQNEKPYHYVSVPEFVAKFKKFHMGKSLKKQLSVPFHKRKIHKYALVFSKKSVSTLELLKVYGPKNDFS

SEQ ID NO: 79944 - protein, 1538 aa, Zea mays
  Coding DNA Sequence Number=SeqID_38165
  Gene Ontology: Mol. function=nucleoside-triphosphatase activity; Cellular component=integral to membrane; Biological process=transport
  Homolog annotation: Hit_ID=Q7FMW4; Match level="QueryCoverage=99%, HitCoverage=98%, E-value=0.0, Identity=73%"; Hit description =Pleiotropic drug resistance protein 15
  Pfam annotation: Domain name=ABC2_membrane; Domain location=1262 -1476; Score=234.9; E_value=1.8e-67; Accession=PF01061.14; Description=ABC-2 type transporter
  Pfam annotation: Domain name=ABC2_membrane; Domain location=575-788; Score=207.1; E_value=4e-59; Accession=PF01061.14; Description=ABC-2 type transporter
  Pfam annotation: Domain name=ABC_tran; Domain location=192-413; Score= 69.2; E_value=1.3e-17; Accession=PF00005.17; Description=ABC transporter
  Pfam annotation: Domain name=ABC_tran; Domain location=975-1165; Score=105.0; E_value=2.2e-28; Accession=PF00005.17; Description=ABC transporter
  Pfam annotation: Domain name=PDR_assoc; Domain location=793-857; Score=132.9; E_value=8.8e-37; Accession=PF08370.2; Description=Plant PDR ABC transporter associated
  Pfam module annotation: Pfam domain module=ABC2_membrane::ABC2 _membrane::ABC_tran::ABC_tran::PDR_assoc; Domain location=1262 -1476::575-788::192-413::975-1165::793-857
METLSRGLHGMSSPDATPYFSGASSRRRSGADEVDDEEALQWAAMERLPSFERLRTGLVRPADASDGGSDSGRRGRRRRHAHEEVDVRAMGLAQRQAFVERVFRVADEDNERFLRKLRARIDRAGIQIPTVEVRFRGVNVQAECHVGTRALPTLANVSLDVADSLLGRVGVKLGKRKTLHILKDVSGVVRPSRMTLLLGPPSSGKTTLLLALAGKLDPTLEVSGEVTYNGYGLDEFVPQKTAAYISQNDIHDGEMTVKEVLDFSARCQGVGQRYELLKELAKKERQQGIYPDPEVDLFMKATSVHGATLQTDYILRILGLDMCADIIVGNELMRGISGGQKKRLTTGEMLVGPTKVLFMDEISTGLDSSTTFQIVKCIQQIVHLGEATVLASLLQPAPEVFELFDDVMLLSEGQIVYQGPREYVLEFFEVCGFRCPQRKGVPDFLQEMDHHVADRKEILDRPHEIAPLGLSGKFNDFFHSAIWHCGTSKYRTQSCMLGSLHCLKWPKVTSKKDQEQYWIQNEKPYHYVSVPEFVAKFKKFHMGKSLKKQLSVPFHKRKIHKSALVFSEKSVSTLELLKVSWSKEWLLMKRNSFVYIFKIVQGILVALVASTVFLRTQMHTRNEEDGQIYIGALLYVMIVNMFNGFAESSILLARLPVLYKHRDFLFYRPWTIVLPNVLMRVPASIFESIIWVAVTYYSIGFAPEASRFFKHLVAVFFIQQMAAGLFRLVTGLCRTVIITNTAGSLAVLFMFTLGGFILPKDAISKWLIWAYYCSPLTYAYIALAFNEMHSPRWMDQFAPDGRRLGVAILENSSIFTGKEWYWIATGALLGFTVLFNVLFTLSLMYLNPVGKPQAILPEETDTSLEDSEEGKKMTDITQRTKIPTPEPLSSNSMITLDKVLEQLRGQSPNTSDRSHMNASVRITPGRGMILPFEPLSMSFNEINYYVDMPAEMKSQGVTADKLQLLSGISGAFRPGVLTALMGVSGSGKTTLMDVLSGRKTGGYIEGEIYISGYPKNQETFARISGYCEQNDIHSPQITIRESLLFSAFMRLPKEVTDQEKKIFVDEVMELVELNGLKDAIVGLPGVNGLSTEQRKRLTVAVELVANPSIIFMDEPTSGLDARAAAVVMRTVRNTVNTGRTVVCTIHQPSIDIFEAFDELLLMKRGGQIIYSGPLGRNSHKVVEYFEAVPGIPKIKEGCNPATWMLDVTSASTEVQLNIDFAEHYKSSTMHQRNKALVKELSKPPPGSSDLYFPTQYSQSTFDQFRFCLWKQWLTYWRSPDYNLVRMFFALFTALLLGIIFWRVGSKMKSSSDLLIIVGSMYFAVAFIGFENCITAQPVIAVERTVFYRERAAGMYSAIPYAFSQVVAEIPYVFVESVIYTVIVYPMMSFQWTLAKFFWFFYISFLSFLYFTYYGMMGVAITPNPQVASIFAASFYTLFNLFSGFIVPRSRIPVWWIWYYWICPVAWTVYGLIVSQYGDVEDLIKVPGKPDQQVKAFIKDYFGYDPDFMGVVAAVLAGFTALFAFIYVYCIKRFNFQQR

SEQ ID NO: 79945 - protein, 137 aa, Zea mays
  Coding DNA Sequence Number=SeqID_38166
  Gene Ontology: Mol. function=zinc ion binding; Cellular component =nucleus
  Homolog annotation: Hit_ID=Q1SJ15; Match level="QueryCoverage=72%, HitCoverage=29%, E-value=7e-09, Identity=39%"; Hit description =Nuclear protein SET; Zinc finger, RING-type; Zinc finger, FYVE/PHD- type
MGHDVYLTPYGVQPLEVLHEDPLRTSAPTDQVVFLSIGRSGTNAFNNELTYGMVPQSVNRAVLEASHWWDASAGREDVETLVQCQRMIACGEWPPLVVAYNHVEGFTMEAGGMQVLVDQVGSTILFIKSMVLQFYYL

SEQ ID NO: 79946 - protein, 207 aa, Zea mays
  Coding DNA Sequence Number=SeqID_38167
  Homolog annotation: Hit_ID=Q9FG56; Match level="QueryCoverage=49%, HitCoverage=75%, E-value=6e-13, Identity=42%"; Hit description =Arabidopsis thaliana genomic DNA, chromosome 5, BAC clone:F10E10
MGFFRRIAGFLGISRDDADHPDSPTSVGGAAAAAELPHDRAAAHGVRQGFSVKVPVHVERQVPVPVLVPCPQGDGGVQGFRWYTRRLRIDEDGDVADEFLDEIIPEGSISNDKSARFQVKYNNKPAAVALRKQVIAVDGDIRHSLEHQGQLRWCVGMLDLMAIETPCTTSSCTLLKQLPLYMLNVLAWQWICQTGEKLECDTSAFSL

SEQ ID NO: 79947 - protein, 139 aa, Zea mays
  Coding DNA Sequence Number=SeqID_38168
MIWFLCLSNQGFRWYTRRLRIDEDGDVADEFLDEIIPEGSISNDKSARFQVKYNNKPAAVALRKQVIAVDGDIRHSLEHQGQLRWCVGMLDLMAIETPCTTSSCTLLKQLPLYMLNVLAWQWICQTGEKLECDTSAFSL

SEQ ID NO: 79948 - protein, 490 aa, Zea mays
  Coding DNA Sequence Number=SeqID_38169
  Homolog annotation: Hit_ID=Q6RY59; Match level="QueryCoverage=22%, HitCoverage=33%, E-value=1e-31, Identity=59%"; Hit description =Malate dehydrogenase
  Pfam annotation: Domain name=Ldh_1_N; Domain location=172-298; Score =38.3; E_value=4.3e-09; Accession=PF00056.13; Description =lactatemalate dehydrogenase, NAD binding do
MVAKLLECWPDMEYDVSDCKQILLPFSFMGHFTLYVLNMDTRSIYIMDSMPIPSWFKGDHPSMHYIHNIHYIANNMNAAMELANPTWKDDIYMWRRIVPTWVPRTLNWDLSGFLVINFMHDWNGIRLPCICTHCNLSPLPVYEPAFDWENERSLIFGQRVPESIPAISNSGLKITVKIGYTIVAMIARGLMLGPDQPVVLYMLDLPKSADALSGVRMELIDAALPLLRGVVATSDEPEAFRGVSFAVLIGGWPRKEGVQRKDLIAKNVPIYQSQASALQQHAALNCKGFRWYTRRLRIDEDGGVADEFLDEILTEGSISNDKAQGIILACANGLDCAIKRGRRVALDLVILEHHCIREHKACSFFGIIYQSSQIFTGTNAFNNELTYGMVPQSVNRAVLEASHRWDASAGREDVETLVQCQRMIACGEWPPLVVAYDHVEGFTMEAGGMQVLVDQDMEKEIRKQVDDAIAKAKLDEASRALLMKVLEDAT

SEQ ID NO: 79949 - protein, 402 aa, Zea mays
  Coding DNA Sequence Number=SeqID_38170
  Gene Ontology: Mol. function=cysteine-type peptidase activity; Biological process=proteolysis
  Homolog annotation: Hit_ID=Q109R5; Match level="QueryCoverage=98%, HitCoverage=43%, E-value=3e-60, Identity=31%"; Hit description=Ulp1 protease family, C-terminal catalytic domain containing protein
  Pfam annotation: Domain name=Peptidase_C48; Domain location=40-211; Score=-27.2; E_value=0.059; Accession=PF02902.9; Description=Ulp1 protease family, C-terminal catalytic domain
MNQLDSFVSEDYKCTPEDVQLIEYIKTLPGKQVVVDIDSAWLNRNDMECLFHGDIQLSGEALSAYIHCIRDEEHLLHREGGKVFLENTFISSLLKRDGDPKVFIPMNIENFHWYLAVLNAKKSELKGLERQIKLAAEHKELYQGKWSKLDVASWPVIEKITTQMQTDGVSCGLWMINYMEYWTGSSLSDNVTQDDITMFRFKLPAILWDSRLNTKKGHQNLDHNVDEDGESSSDVQIIDTPLTSTNTQELMFVLCTYIMGIDNAKYLKKHWIQSTKPYPISLSLQKLKDILDVNKPMDTDCFNMAVRMIACNDALFLLEDKYHYMDLQFCSITKFGRDPRLRAKPDINMLAKLLECWPDMECDVSDCKQILLPFSFMGHFTLYVLNMDTRIIYIMDSMPIPS

SEQ ID NO: 79950 - protein, 87 aa, Zea mays
  Coding DNA Sequence Number=SeqID_38171
  Subcellular localization annotation: CTP_CleavageSite=55; ConfidenceScore=5.16e-01
MEPGGGTAVGAVGSLLTSSCFRKGAESRRRHRVGRCGGSSEAEVESVFHGRGRVRAPGSGEAEVVGRGQGEVRALGSGEAEFVVFWG

SEQ ID NO: 79951 - protein, 582 aa, Zea mays
  Coding DNA Sequence Number=SeqID_38172
  Gene Ontology: Mol. function=protein binding
  Homolog annotation: Hit_ID=Q6QP54; Match level="QueryCoverage=12%, HitCoverage=25%, E-value=8e-16, Identity=70%"; Hit description =Putative kinase
  Subcellular localization annotation: CTP_CleavageSite=38; ConfidenceScore=5.43e-01
MQTGSEQKKPNRRVWGTQPPSGYKRSSTFAQTNGRERRAAMQAACNRAKWTRFSDSQRAQPGGPGPRVTQPARRMLHASKCTATCATTAPLWLRNQYRDSRRLGTRPSSASLTRRSMRPKRESSLSRCEDNAPVIRSSNGSHTRNGCPANHSPRCINSAAGQVALLAAATGDASPSPKQPHQKRLAPEGFNSRLRSRGPYTHYWLALEGFTVASDAERGMTRDHPQVLLGVPLGPYPTPNERGTDVHSDYPLAAHRRHHVRCPSRRLGGCSRKPGSGRTVDSVNIPARELGPRPYTQATASSHEGTTRPAEALRKALRPRRSEITPPRPRGLHPAGALARTHRNQKQPRKAGPLAKKCDESLQASANTPFEARGLLSGTIIRGTLKTPNSQLVTPISIKLQRPNGGSDSASADELRLARPRGSDSASADELRLARPRGSDSASADDLRLARPRGSDSASADDLRLARPRGSDSASADDLRLARPRGSDSASADDLCLARPRGSDSASAMEDRLDPGFGGASTSPNLGHRPATSTGSAIITLPRADSGRREQDLLRCSSDSHDITPAGCQDLSGCHIGMYLGH

SEQ ID NO: 79952 - protein, 180 aa, Zea mays
  Coding DNA Sequence Number=SeqID_38173
MSSGTPLAAAEEAPTAPAPAIKVDAGGASSSILLPTPEETEVIFERRLRSGAELEAAPIPLPQVLSRAHQALHETKAAILREWEALEAEHQHLSDWRTQLEERTKVASCQFAFERSELERDHKDYKKDLQKVYARELEVARKDKRLAKKEEHLDQREEVVMELQAKLSAFNKILEEQRVQ

SEQ ID NO: 79953 - protein, 431 aa, Zea mays
  Coding DNA Sequence Number=SeqID_38174
  Subcellular localization annotation: CTP_CleavageSite=44; ConfidenceScore=5.74e-01
ASSPSAPKVVPPPPLAAASETVPLGSHAPAGGLAVAVPTSSGVTAAERVPTAPTAATASTTTMSSGTPLAAAEEAPTAPAPAIKVDAGGASSSILLPTPEETEVIFERRLRSGAELEAAPIPLPQVLSRAHQALHETKAAILREWEALEAEHQHLSDWRTQLEERTKVASCQFAFERSELERDHKDYKKDLQKVYARELEVARKDKRLAKKEEHLDQREEVVMELQAKLSAFNKILEEQRDKASSIALAEENLKEKDASLDKREKEQTLEERVHQFQAAQAAQAAPGPQAVEVMKKTLEDLQVEQHAGVQRIAAWASEASMALVPLWVSPIPVLELPTSISDALPVLDSAADRLRCLDQILGAHLEAEGSRLCRAVIEYIMTCFRSHDPAISLEPVIAGPVADTEDTAWEGVQDAVELVAECFQRDPTDDE

SEQ ID NO: 79954 - protein, 147 aa, Zea mays
  Coding DNA Sequence Number=SeqID_38175
MGQSLLSRTRHLCPWWMAPTVSLVFNIVCDYYELVKHFYRPWTIRLWVGRAGWLDLCASVNYNTTVGSSATGVRYPRTKVGIAVDQNNTKVDTEPKVRAGKLRRDSKEWNRLKDEKAIQTSIDYYRVIIKCKGHECNFVRAVSRVYK

SEQ ID NO: 79955 - protein, 125 aa, Zea mays
  Coding DNA Sequence Number=SeqID_38176
MEEEGGRREELGRRRTAAGEEDRQRGGETPEKLRDREQRGKREASGSVSGWRYPRTKVGIAVVRNNTKIDTEPKVRAGKLRRDSKEWNRLKDEKAIQTSIDYYRVIIKCKGHECNFVRAVSRVYK

SEQ ID NO: 79956 - protein, 89 aa, Zea mays
  Coding DNA Sequence Number=SeqID_38177
MPSQREQYGDTVHLFIDTGHSPYKITFMPFTFDNNSIVVYRDCNLADGEYVLIPEQGPVQEEDQEQASEAAIEDLPAAPAIEGKPRFYA

SEQ ID NO: 79957 - protein, 66 aa, Zea mays
  Coding DNA Sequence Number=SeqID_38178
MSSMCEPLLPTLGHGLGNSSHEPSAVGTNKNKLQMYLRLEGEKIQMWCKSECQVSVNSTGILFTYL

SEQ ID NO: 79958 - protein, 56 aa, Zea mays
  Coding DNA Sequence Number=SeqID_38179
MMLAKGIQDSENGSEFTGDKNKLQMYLRLEGEKIQVWRKSECQVSVNSTGILFTYL

SEQ ID NO: 79959 - protein, 87 aa, Zea mays
  Coding DNA Sequence Number=SeqID_38180
  Subcellular localization annotation: CTP_CleavageSite=27; ConfidenceScore=5.22e-01
MAKLNFNFNRGPGQVQPGSREVQPGSRAGSTGVQGKFNRGIFPGPHWSKPVESVLGEVQPVSGSPDRSDLLTGRLTASVTPRRLNRP

SEQ ID NO: 79960 - protein, 87 aa, Zea mays
  Coding DNA Sequence Number=SeqID_38181
  Subcellular localization annotation: CTP_CleavageSite=27; ConfidenceScore=5.23e-01
MAKLNFNFNRGPGQVQPGSREVQPGSRAGSTGVQGKFSRGIFPGPHWSKPVEPVLGEVQPVSGSPDRSDLLTGRLTASVTPRRLNHP

SEQ ID NO: 79961 - protein, 122 aa, Zea mays
  Coding DNA Sequence Number=SeqID_38182
MSGKADRAEGLLRLRDTDTSLITFRERNELPPHQRGYEITNSKRLADDHCTSSDNDLHLGWLDSSSDCLRANANVKMPSLTSPYEGREPAIKAKDPEVRSAGGTDGLVGGGNRFCKGKPHLW

SEQ ID NO: 79962 - protein, 152 aa, Zea mays
  Coding DNA Sequence Number=SeqID_38183
MSGKADRAEGLLRLRDTDTSLITFRERPQQPQRTNTHTQGKYRYIPLQTGLQLHSRRNELPPHQRGYEITNSKRLADDHCTSSDNDLHLGWLDSSSDCLRANANVKMPSLTSPYEGREPAIKAKDPEVRSAGGTDGLVGGGNRFCKGKPHLW

SEQ ID NO: 79963 - protein, 121 aa, Zea mays
  Coding DNA Sequence Number=SeqID_38184
MVRERRTRISTMNKNTRDTRFIPRFGHTTKVPYFLVEAPTKSRVSFKPNPPFADHKDCWLEVRGVRDQLNCPSGPVQLVLTREFRRENPSSTARRQVQLVYGQRGSQLKLSSAEVEKAQLS

SEQ ID NO: 79964 - protein, 121 aa, Zea mays
  Coding DNA Sequence Number=SeqID_38185
MVRERRTRISTMNKNTRDTRFIPRFGHTTKVPYFLVEAPTKSRVSFNPNPPFVDHKDCWSEVRGVRDQLNCPSGPVQLVLTREFRRENPSSTARRQVQLVYGQRGSQLKLSSAEVEKAQLS

SEQ ID NO: 79965 - protein, 89 aa, Zea mays
  Coding DNA Sequence Number=SeqID_38186
  Subcellular localization annotation: CTP_CleavageSite=25; ConfidenceScore=5.23e-01
MSPCSSSPRVPKSAGLQAPPHTGTSYMKNVDRPPSNPKRIIIQSTQECFSVDIPRVPAKTVRHKPMQAGDEDDNFMPLSKKRNFDDSPP

SEQ ID NO: 79966 - protein, 237 aa, Zea mays
  Coding DNA Sequence Number=SeqID_38187
  Gene Ontology: Mol. function=cysteine-type peptidase activity; Biological process=proteolysis
  Homolog annotation: Hit_ID=Q53MK8; Match level="QueryCoverage=84%, HitCoverage=20%, E-value=4e-15, Identity=28%"; Hit description=Ulp1 protease family, C-terminal catalytic domain, putative
MGTSYMKNVDRPPSNPKRIIIQSTQECFSVDIPRVPAKTVRHKPMQAGDEDDDFMPLSKKRNFDDSPPKVLKKIVTKRRKRLNVRCNPQDVIVSIQILNDRQRQAIAQRGFSSILDMRVDALGSRSHLAWLMEKLDHNDMTIRAGLGKDIKITKETMHLILGLPNAGGGTTLGIDEAVATNNLTAELGLSKEEFGVAALQDRLRKGFDDDLSIRSFFLILFNRLLFPTASWGITNHE

SEQ ID NO: 79967 - protein, 193 aa, Zea mays
  Coding DNA Sequence Number=SeqID_38188
MAPLMTINGGETAPLKLLYSSDEWTAWDFGREVFGARVHGSSARRGIGVAGRPLVRLKARMAWSGSGLGRVRVAEWARSLQAGRRGAGVRSAGLRAVAALGASSLGGVGLGARVQGRGRRVLGAASVEAGAGRAWLLGFGPVAGGSRQGRGKRGERESQVREREPGGEEEMAAAKGAGGSGGRLEEEGKRLGV

SEQ ID NO: 79968 - protein, 173 aa, Zea mays
  Coding DNA Sequence Number=SeqID_38189
  Subcellular localization annotation: CTP_CleavageSite=20; ConfidenceScore=5.22e-01
MTTVPIDSPFASRPHRLGIQCSTDPGCRRAVTALPSAPRPCFPPTPRRAHAYRAPAREAPSPTPPRLLAPKAATARKPAERTPAPRRPACSDRARSATRTLPRPLPDRAMRASSRTRGRPATPIPRRAEDPAAAATDRAKNRAPEYRRPRDQNPTPSIHHSSKEASMESFLPH

SEQ ID NO: 79969 - protein, 61 aa, Zea mays
  Coding DNA Sequence Number=SeqID_38190
  Subcellular localization annotation: CTP_CleavageSite=49; ConfidenceScore=5.30e-01
MAALQKSPRGSSGHDGRKHNGNMIVFPAMGAGLARFNGSAPRAVALNLTAMRRRPERRKKH

SEQ ID NO: 79970 - protein, 61 aa, Zea mays
  Coding DNA Sequence Number=SeqID_38191
  Subcellular localization annotation: CTP_CleavageSite=49; ConfidenceScore=5.40e-01
MAALQKSPRGSSGHGGRKHNGNMIVFPAMGAGLARFNGSAPRAVALNLTAMRRRPERRKKH

SEQ ID NO: 79971 - protein, 88 aa, Zea mays
  Coding DNA Sequence Number=SeqID_38192
MQIIERRCEAQKGAGIRRKKTLDKLTDQPRNLIPLDRAGVPDLSVSGDNSDLVEVDPHDSTTTSDPEAPMQSLNQLPMVTDLADARSA

SEQ ID NO: 79972 - protein, 101 aa, Zea mays
  Coding DNA Sequence Number=SeqID_38193
MADWAWPAAETGRRERGERRHHSWDVFAEMCSLAAIRGMSHPHRALAEHHDARSRASTTTTSSSSSSARRDDDPDPPPRSLKDPPYTLVPKIFDWDEQRAA

SEQ ID NO: 79973 - protein, 179 aa, Zea mays
  Coding DNA Sequence Number=SeqID_38194
  Homolog annotation: Hit_ID=Q10MQ0; Match level="QueryCoverage=48%, HitCoverage=19%, E-value=2e-16, Identity=51%"; Hit description =Glycosyltransferase 5, putative, expressed
MDSQAPTNSDDEGRIQAVADWAWPAAETGRSSFTAVRMSAPPRVMCSLAAIRGMSHPHRALAEHHDARSRASTTTTSSSSSSARRDDDPDPPPRSLRDPPYTLGPKIFDWDEQRTVWHRRHLETPPFLNDIKPRVLLVTTIYVVSGPIVLDKYQLHEAVQEKERGVDSLGRTPCYKDTH

SEQ ID NO: 79974 - protein, 143 aa, Zea mays
  Coding DNA Sequence Number=SeqID_38195
  Homolog annotation: Hit_ID=Q10MQ0; Match level="QueryCoverage=25%, HitCoverage=8%, E-value=2e-13, Identity=88%"; Hit description =Glycosyltransferase 5, putative, expressed
MASTTTTSSSSSSARRDDDPDPPPRSLRDPPYTLGPKIFDWDEQRAAWHRRHLETPPFLNDIKPRVLDKYQLHEAVQEKERGVDSLGRTPCYKANVATAVGMSDAVEQQSPKDNDADIQEDTFFVLLNICMSGDSQNEANPTL

SEQ ID NO: 79975 - protein, 361 aa, Zea mays
  Coding DNA Sequence Number=SeqID_38196
  Gene Ontology: Mol. function=transferase activity, transferring hexosyl groups; Cellular component=integral to membrane; Biological process=electron transport
  Homolog annotation: Hit_ID=Q10MQ0; Match level="QueryCoverage=88%, HitCoverage=75%, E-value=0.0, Identity=88%"; Hit description =Glycosyltransferase 5, putative, expressed
  Pfam annotation: Domain name=Glyco_transf_34; Domain location=71-298; Score=322.8; E_value=6e-94; Accession=PF05637.3; Description =galactosyl transferase GMA12MNN10 family
MAEHHDSRSRASTTTTSSLSSSARRDDDPDPPPRSLRDPPYTLGPKIFDWDEQRAAWHRRHPETPPFLNDIKPRVLLVTGSSPKPCENPVGDHYLLKSIKNKMDYCCVHGIEVFYNMALLDAEMAGFWAKLPLMRALLLAHPELPWERSATGPYNLIMHGWDEMVYDDKNWIGLNTGSFLLRNCQWSLDMLDTWAPMGPKGPVRIEAGKVLTKSLKDRPVFEADDQSAMVYILATQREKWGDKVYLENGYYLHGYWGILVDRYEEMLENYKPGLGDHRWPLVTHFVGCKPCGKFGDYPVERCLKNMDRAFNFGDNQILQMYGFTHKSLASRRVKRIRNETSNPLETKDELGLLHPAFKAST

SEQ ID NO: 79976 - protein, 77 aa, Zea mays
  Coding DNA Sequence Number=SeqID_38197
  Gene Ontology: Mol. function=transcription factor activity; Cellular component=transcription factor complex; Biological process =regulation of progression through cell cycle
  Homolog annotation: Hit_ID=Q9FRZ8; Match level="QueryCoverage=78%, HitCoverage=15%, E-value=1e-17, Identity=77%"; Hit description=E2F homolog
MGTDIGTTSNAMLKRKHNDRTENEAAESNDWMSPGYANAGSSPVPTPPSGKGLKASTKPKATKGQKSGPQTPLGFDE

SEQ ID NO: 79977 - protein, 62 aa, Zea mays
  Coding DNA Sequence Number=SeqID_38198
MGAESPGRKNRRRFLESCGGWGFAVMETEPGAKELIAGSRRYLYGNRKGIPSTHYDYVREPA

SEQ ID NO: 79978 - protein, 118 aa, Zea mays
  Coding DNA Sequence Number=SeqID_38199
MAENVEAVGSAESEGAEPSRGEGRVFAGRRMQRREYWSDDWGNRGRAAQMPLATGSTASGEGLEESSERGAESPGWKNRRRFLESCGGWGFAVMETEPGAKELIAGSRRYLYGNRKVT

SEQ ID NO: 79979 - protein, 102 aa, Zea mays
  Coding DNA Sequence Number=SeqID_38200
MAENVEAVGSAEGEGAEPSPEKVGFSPVAECSGANVGATIGETEGAPLKCRLRLDRQRAARGWKSRRKWERSRREGRIAGDSWSRAGVGVLRLWKLSREQRS

SEQ ID NO: 79980 - protein, 181 aa, Zea mays
  Coding DNA Sequence Number=SeqID_38201
MAENVEAVGSAESEGAEPSRGEGRVFAGRRMQRREYWSDDWGNRGRAAQMPLATGSTASGEGLEESSERGAESPGWKNRRRFLESCGGWGFAVMETEPGAKELIAGSRRYLYGNRKEADTSALRVHRSVAASTGMQRISIGHGDTLRCSLDDLLADRGRQPRTGGAGDRRRPVPPSKAGAA

SEQ ID NO: 79981 - protein, 62 aa, Zea mays
  Coding DNA Sequence Number=SeqID_38202
MAENVEAVGSAESEGAEPSPEKQLHSTYFKSSRTARVPKRWIQKTNMEHEPAERAERRRQAK

SEQ ID NO: 79982 - protein, 319 aa, Zea mays
  Coding DNA Sequence Number=SeqID_38203
  Gene Ontology: Mol. function=cysteine-type peptidase activity; Biological process=proteolysis
  Homolog annotation: Hit_ID=Q53MK8; Match level="QueryCoverage=89%, HitCoverage=30%, E-value=1e-22, Identity=25%"; Hit description=Ulp1 protease family, C-terminal catalytic domain, putative
MKQVDRPPNNPKRITIQSSQECFSVDIPSAEHPNPCPEVENPSNADSQNVTNETVQIDSDEDDFMPAMKKRNVSESHTRVLRKVVTKRVKHEELPRQRLNVRCNPQDVIASINILNERQREAIRRKGFSSILDMTVDALCSRSHLQWLMDKLDPKDMTIRPGPGKELKITKDIVHLILGVPNHGGGKPLGIDEAVAASNLRAELGVAKDEFNVAFLQDRLRKGEDDDLSIRCFFLILFNRLLFPTASWGITYHEVLLTEEMHRFHEIDWCQLIFNDLCEAAKKWHNRITTNVSTTIYGRSFAGGASMRILDLSFFTGCK

SEQ ID NO: 79983 - protein, 705 aa, Zea mays
  Coding DNA Sequence Number=SeqID_38204
  Gene Ontology: Mol. function=cysteine-type peptidase activity; Biological process=proteolysis
  Homolog annotation: Hit_ID=Q53MK8; Match level="QueryCoverage=61%, HitCoverage=47%, E-value=8e-34, Identity=24%"; Hit description=Ulp1 protease family, C-terminal catalytic domain, putative
  Subcellular localization annotation: CTP_CleavageSite=35; ConfidenceScore=5.55e-01
MTPAGRTELKRTSQLRPSHHRRRRFHNRKTPTPARLQESPAILPSRRLRSPFRRLFQPLAARCRSSRKRHLSGAPSVSPIVAAIFAPLHSATGENPTFSGDGSAPSLSADPTASTFSAILNIRRRQRAPLQSMITANTLFGYSKQVDRPPNNPKRITIQSSQECFSVDIPSAEHPNPCPEVENPSNADSQNVTNETVQIDSDEDDFMPAMKKRNVSESHTRVLRKVVTKRVKHEELPRQRLNVRCNPQDVIASINILNERQREAIRRKGFSSILDMTVDALCSRSHLQWLMDKLDPKDMTIRPGPGKELKITKDIVHLILGVPNHGGGKPLGIDEAVAASNLRAELGVAKDEFNVAFLQDRLRKGEDDDLSIRCFFLILFNRLLFPTASWGITYHEVLLTEEMHRFHEIDWCQLIFNDLCEAAKKWHNRITTNVSTTIYGCSIVVLLYYLDHLHTAAAPHNKSGTPRIKFFDKNSIKALTKADKRKVRHGAESFGHCENTKVDMDSYYFLLNNQPECRTNIFDAPRPGPMPRPTFNIKLPSIKEMMSSKINDLPHRHRSKFTDILAAYDLEVDKSCVAIKDSIDKIIVKQYDIADKFIELIDEVLRAESENLENETDEPQQPGNSADSAGHTVDATQPTPDMPSQASQLETQLGATQFEEIHERQQHIRTVLETFPDESDVVSDQQQYANHTFFVNRISVLMFET

SEQ ID NO: 79984 - protein, 217 aa, Zea mays
  Coding DNA Sequence Number=SeqID_38205
  Gene Ontology: Mol. function=cysteine-type peptidase activity; Biological process=proteolysis
  Homolog annotation: Hit_ID=Q69KF0; Match level="QueryCoverage=63%, HitCoverage=31%, E-value=3e-10, Identity=30%"; Hit description=Pr1 -like protein
QECIRSLWDLICSKDIDQSRVVIDYGDYSANCMDIYDSFAEGKCLEDVFMQCFIECVRDDSKNHRRTLTSNRLILDVNVGALLNFEEQERHSKNPQPFDQNVLQNCLHNTLPALVNLDKCKSIMVPMLSRGHWTLYVINLHHRVIHILDSNPYGIQLGGTEWKDYHYDPIYLGGRKFPWARVVSYLLSINQTIPEIYVLMPFINSHSIASTRRCHFH

SEQ ID NO: 79985 - protein, 633 aa, Zea mays
  Coding DNA Sequence Number=SeqID_38206
  Gene Ontology: Mol. function=cysteine-type peptidase activity; Biological process=proteolysis
  Homolog annotation: Hit_ID=Q53MK8; Match level="QueryCoverage=32%, HitCoverage=20%, E-value=2e-21, Identity=30%"; Hit description=Ulp1 protease family, C-terminal catalytic domain, putative
  Pfam annotation: Domain name=Peptidase_C48; Domain location=377-623; Score=-0.6; E_value=0.00062; Accession=PF02902.9; Description=Ulp1 protease family, C-terminal catalytic domain
MDKLDPKDMTIRPGPGKELKITKDIVHLILGVPNHGGGKPLGIDEAVAASNLRAELGVAKDEFNVAFLQDRLRKGEDDDLSIRCFFLILFNRLLFPTASWGITYHEVLLTEEMHRFHEIDWCQLIFNDLCEAAKKWHNRITTNVSTTIYGCSIVVLLYYLDHLHTAAAPHNKSGTPRIKFFDKNSIKALTKADKRKVRHGAESFGHCEQYDIADKFIELIDEVLRAESENLENETDEPQQPGNSADSAGHTVDATQPTPDMPSQASQLETQLGATQFEEIHERQQHIRTVLETFPDESDVVSDQQRGAMATEEMEQNDSGPVFDQTPTPHVDTLKGTTNSGSDPPLTEQECIRSLWDLICSKDIDQSRVVIDYGDYSANCMDIYESFAEGKCLEDVFMQCFIECVRDDSKNHRRTLTSNRLILDVNVGALLNFEEQERHSKNPQPFDQNVLHNCLYNTLPSLVNLDKCKSIMVPMLSRGHWTLYVINLHHRVIHILDSNPYGIQLGGTEWKDYHYDPIYLGGRKFPWARVIMSRLSKALQHVCPNAEFPKFGNFPLDMPSNCPTMRTGSNDCGFFVMSYMKSYDHNAGVISSFNQPDNSRDLRAHALHQLTFHRINKALPLPLDIQRFMFARN

SEQ ID NO: 79986 - protein, 91 aa, Zea mays
  Coding DNA Sequence Number=SeqID_38207
MAVAATAHPCYPLDCARVLSHVEPPPSGFGLQQPLPLRVECADTDLRSPDAMLSNSALVVVTPRASLLGKEPQTDGTHAQLGSEFVRLMDL

SEQ ID NO: 79987 - protein, 110 aa, Zea mays
  Coding DNA Sequence Number=SeqID_38208
MDGARPCCVSPCGISSRLPLCSRERRDMLDVLAPSHGGSRRVPSIWFRAAAAISASSRSKLHRRSAQPLFGCRSASVDLLRARATAAAAPSRRVCRHGSTQSRRDVVKLR

SEQ ID NO: 79988 - protein, 125 aa, Zea mays
  Coding DNA Sequence Number=SeqID_38209
  Homolog annotation: Hit_ID=Q43261; Match level="QueryCoverage=26%, HitCoverage=24%, E-value=8e-07, Identity=75%"; Hit description =Histone H2B.3
MTSLYGLGVHPFSAYLVSHNKLRPQTEEGELSPNGEMKEEHFCVCSDEAIDGTSKQNEGYIKFISALYNLLDGSSEEKPAAEKTTAGKKPKAEKRVPAGKSAGKEDGESKRGRKKGKKNINIKLL

SEQ ID NO: 79989 - protein, 85 aa, Zea mays
  Coding DNA Sequence Number=SeqID_38210
MKVLPADLMEMNHFMFCSGYIKFISALYNLLDGSSEEKPAAEKTTAGKKPKAEKRVPAGKSAGKEDDESKRGRKKGKKNINIKLL

SEQ ID NO: 79990 - protein, 95 aa, Zea mays
  Coding DNA Sequence Number=SeqID_38211
MAEALAAMAGGIELAGAKGKWLAGEGTGSCSVTKVPVSECLVPRSSYAKTMSNEFGLSSNFFRMCSREFGTTLIFGSPGFEFRKTENVDDLWEEV

SEQ ID NO: 79991 - protein, 95 aa, Zea mays
  Coding DNA Sequence Number=SeqID_38212
  Subcellular localization annotation: CTP_CleavageSite=64; ConfidenceScore=5.04e-01
MAEALAAMAGGIELAGAKGKWLAGEGTGSCSVTKVPVSECLVPRSSCAKTMSNEFGLSSNFFRMCSREFGTTLIFGSPGFEFRKTENADDLWEEV

SEQ ID NO: 79992 - protein, 117 aa, Zea mays
  Coding DNA Sequence Number=SeqID_38213
MELHDALSGRLNGDRHGTVPGWDQTVSTQKISPSMSLAMIRVTGARIHTRGGWITSRGKGSSPPKIDENEEEIEVTEEKTPPPLESQAGTCLYFDICGPEPDSPTNEGKPRCICHLP

SEQ ID NO: 79993 - protein, 186 aa, Zea mays
  Coding DNA Sequence Number=SeqID_38214
MAVEVLHVVGKPADDPGTGGERSTRAATEAARRCPAMEDWGKDGEGKSRVASHLYPEARKIRVCTGSDRQRQKNLTVDESRRDSCHRRQDSHSGWMDNVAGERSSPPVLAGARLCANAVVDFQPRIDRSAGGLFVNENEEEIEVTEEKTPPPSESQAGNCFYFDICGSKPDSPTNEGKPRCICHLP

SEQ ID NO: 79994 - protein, 93 aa, Zea mays
  Coding DNA Sequence Number=SeqID_38215
MACSCDDGHGVALEATTSRVNASGVGEDGWEGVAAADGAAAGGGEGWAAGGGEDNLELIPGVMDLQSMGIAVFSGEVIPLCRRLGSRVAAPHE

SEQ ID NO: 79995 - protein, 185 aa, Zea mays
  Coding DNA Sequence Number=SeqID_38216
MDLLSMEISVFSGEVIPLCRRLGSRLCPPVLLDLKERAELRTSRWMKGGLHTQISTSAGGSKSIDETWWLGAQAASWCSDELISKCSFRTARLTRKPRTAACRRTTACSCDDGHGVALEATARCFSPRRDSVEHHNELIPLLCETTKTLFEPSVMDLLSMEITVFSGEVIPLCRRLGSRIAALGA

SEQ ID NO: 79996 - protein, 525 aa, Zea mays
  Coding DNA Sequence Number=SeqID_38217
  Homolog annotation: Hit_ID=Q8SA97; Match level="QueryCoverage=34%, HitCoverage=29%, E-value=3e-16, Identity=45%"; Hit description =Ornithine carbamoyltransferase
MADTLNTEGGTGITAQFASPYPGAGGHRLGHKTQQRQPDATVNAAESGPAVMTVADAREQRARRQPSSRPIRGQRESSLSRCEDNAPVIRSSNGSHTRNGCPANHSPRCINSTAGQVALLAAATGDASPSPKQPHQKRLAPEGFNSRLRSRGPYTHYWSEVRRPAPPKGSTAASGYSGSVPITDEGFEGWPPKDVHSDYPLAAHRRHHVRCPSRRLGGFSRKPGSGRTVDSVNIPARELGPRPYTRATASSHEGTTRPAEALRKALRPRRSEITPPRPRGLHPAGALARTHRNQMQPRKAGPLAKKCDESLQASANTPFEARGLLSGTIIRGTLKTPNSQLVTPISIKLQRPDGGSDSASADDLRLARPRGSDSASADDLRLARPRGSDSASADDLRLARPRGSDSASADDLRLARPRGSDSAYADDLRLARPRGSDSASAMEDRLDPGFGGASMSPNLGHRPATSTGSAIITLPRADSGRRQQGHNRSNSCPSARLRCSSDSHDITPAGCQDLSGCHIGMYLGH

SEQ ID NO: 79997 - protein, 525 aa, Zea mays
  Coding DNA Sequence Number=SeqID_38218
  Homolog annotation: Hit_ID=Q8SA97; Match level="QueryCoverage=34%, HitCoverage=29%, E-value=2e-15, Identity=44%"; Hit description =Ornithine carbamoyltransferase
MADTLNTEGGTGITAQFASPYPGAGGHRLGHKTQQRQPDATVNAAESGPAVMTVADAREQRARRQPSSRPIRGQRESSLSRCEDNAPVIRSSNGSHTRNGCPANHSPRCINSTAGQVALLAAATGDASPSPKQPHQKRLAPEGFNSRLRSRGPYTHYWSEVRRPAPPKGSTAASGYSGSVPITDEGFEGWPPKDVHSDYPLAAHRRHHVRCPSRRLGGFSRKPGSGRTVDSVNIPARELGPRPYTRATASSHEGTTRPAEALRKALRPRRSEITPPRPRGLHPAGALARTHRNQMQPRKAGPLAKKCDESLQASANTPFEARGLLSGTIIRGTLKTPNFQLVTPISIILQRPDGGSDSASADDLRLARPRGSDSASADDLRLARPRGSDSASADDLRLARPRGSDSASADDLRLARPRGSDSAYADDLRLARPRGSDSASAMEDRLDPGFGGASMSPNLGHRPATSTGSAIITLPRADSGRRQQGHNRSNSCPSARLRCSSDSHDITPAGCQDLSGCHIGMYLGH

SEQ ID NO: 79998 - protein, 114 aa, Zea mays
  Coding DNA Sequence Number=SeqID_38219
  Subcellular localization annotation: CTP_CleavageSite=25; ConfidenceScore=5.04e-01
MGKPVPSLLMLLLSRGRVPLNSPTRCIMDQAVSLAARSRRFESSFILARLCIKPGLAFQSSGRQVLWCRLGCWIWGYLLSSSLLRHEDVLSVSKITVYRNAMNMYVMIMQDLRT

SEQ ID NO: 79999 - protein, 114 aa, Zea mays
  Coding DNA Sequence Number=SeqID_38220
  Subcellular localization annotation: CTP_CleavageSite=33; ConfidenceScore=5.27e-01
MGKPVPSLLMLLLSRGRVPLNSPTRCSMDQAVSLAARSRRFESSFILARLCIKPGLAFQSSGRQVLWCRLGCWIWGYLLSSSLLRHEDVLSVSKITVYRNAMNMYVMIMQDLRT

SEQ ID NO: 80000 - protein, 130 aa, Zea mays
  Coding DNA Sequence Number=SeqID_38221
MTSGTHVVSISVALAGTLVTRAPYFTAKWDPMPLSSRRADRGISAVAELAANLGAIDRNPHLGFVPRHYKNLISSLSSSISLAVSPQVHPSPWAADSSFAFSGAAASGHQEGLVRSGGARTVDLLCNDRD

SEQ ID NO: 80001 - protein, 169 aa, Zea mays
  Coding DNA Sequence Number=SeqID_38222
MWALLVRSIFTTEHAATAFAAAEIAESRPWRNLPRTSEPLTEIPTSASSLGTIRISSLLSPPQFRVRRRHTFSQFGHRRGLLGAVDWASVWRCDVALELGGCVRGLGGGVSAPGASELLAAVAVSPQVHPSPWAADSSFAFSDEQATVESEVQQVETAEQELVEGKLCP

SEQ ID NO: 80002 - protein, 131 aa, Zea mays
  Coding DNA Sequence Number=SeqID_38223
  Gene Ontology: Mol. function=oxidoreductase activity, acting on paired donors, with oxidation of a pair of donors resulting in the reduction of molecular oxygen to two molecules of water; Cellular component=membrane; ...
  Gene Ontology: Cellular component=Biological process=fatty acid biosynthetic process
  Homolog annotation: Hit_ID=Q8GVJ4; Match level="QueryCoverage=90%, HitCoverage=30%, E-value=2e-48, Identity=73%"; Hit description =Putative delta 12 oleic acid desaturase
MHSCLFAPYFSWKYSHQRHHANTASLERDEVFVPKQRPEMPWYSPLVYKRDNPVARLVLLAVQLTVGWPMYLAFNTWGRRYSRFACHFDPYSPIYGDRERAQIAVSDAGVLAVSFALYRPLSQPQPVNFLV

SEQ ID NO: 80003 - protein, 383 aa, Zea mays
  Coding DNA Sequence Number=SeqID_38224
  Gene Ontology: Mol. function=oxidoreductase activity, acting on paired donors, with oxidation of a pair of donors resulting in the reduction of molecular oxygen to two molecules of water; Cellular component=membrane; ...
  Gene Ontology: Cellular component=Biological process=fatty acid biosynthetic process
  Homolog annotation: Hit_ID=Q8GVJ4; Match level="QueryCoverage=95%, HitCoverage=93%, E-value=1e-164, Identity=72%"; Hit description =Putative delta 12 oleic acid desaturase
  Pfam annotation: Domain name=FA_desaturase; Domain location=88-342; Score=284.0; E_value=3e-82; Accession=PF00487.14; Description=Fatty acid desaturase
MEQQTKTTTQQEGKGLTTMQRSIVDKPPFTLADLRKAIPPHCFQRSLIRSCSYLAHDLAIAAGLLYLALAVIPALPGVLLRAAAWPLYWAAQGSIMFGVWVIAHECGHSSFSRYGLLNDALGLVLHSCLLAPYFSWKYSHQRHHANTASLERDEVFVPKQRPEMPWYSPLVYKRDNPVARLVLLAVQLTVGWPMYLAFNTWGRRYSRFACHFDPYSPIYGDRERAQIAVSDAGVLAVSFALYRLAAAHGLWPVVSVYGVPLLVTNAWLVVVTYLHHTHRALPHYDSSEWDWLRGALATMDRDYGLLNRVLHNVTDTHVLHHIFPNMPHYHAMEATRAMRPLLGEYYMFDDTPIVKATWREAKQCIYVEPGEEHKGVYWYNNKF

SEQ ID NO: 80004 - protein, 86 aa, Zea mays
  Coding DNA Sequence Number=SeqID_38225
MAARGQAGPQGRGRCHGHHRERSLMWGRTYARQKREAAGGAGSSTRKEGTDAGSSARKEGMAKESAHKEGMANESARKEGMTKESD

SEQ ID NO: 80005 - protein, 69 aa, Zea mays
  Coding DNA Sequence Number=SeqID_38226
MANLSPDSNESTFADWWAKVVFDGVSPSIIGIKANFFDKVEFWRLAGARHLEALVPGAGIFRSRVLLGD

SEQ ID NO: 80006 - protein, 338 aa, Zea mays
  Coding DNA Sequence Number=SeqID_38227
  Gene Ontology: Mol. function=signal transducer activity; Cellular component=myosin complex; Biological process=signal transduction
  Homolog annotation: Hit_ID=Q10F06; Match level="QueryCoverage=76%, HitCoverage=17%, E-value=1e-118, Identity=79%"; Hit description =Unconventional myosin heavy chain, putative, expressed
  Pfam annotation: Domain name=Myosin_head; Domain location=15-338; Score=-107.0; E_value=3.4e-11; Accession=PF00063.11; Description =Myosin head (motor domain)
MMILLKPLLLDLCTCLLTFVHQSAKADSLETGERLAIPNEERILSAVQHLFLIANQRKNLHLGEAQVFHNLFHGSKFDKSGKISGAAIRTYLLERSRVCQINSPERNYHCFYFLCAAPSEDLKKYKLGDPSSFHYLNQSACIQVDGINDAEEYLATRNAMDTVGITDQEQEAIFRVVAAVLHLGNINFAKGREVDSSIIKDDKSRFHLKTAGELLMCDCEKLENALIKREINTPEGVITTTVGPNSATISRDGLAKQIYSRLFEWLVNRINASIGQDPDSNKLIGVLDIYGFESFKTNSFEQLCINFTNEKLQQHFNQNVFKMEQEEYTREQIKLGVT

SEQ ID NO: 80007 - protein, 75 aa, Zea mays
  Coding DNA Sequence Number=SeqID_38228
MASSAGGASSSLAHDDRGRFILRVVPDVGTGREIFNAYCSLHMIIYHWLQHVMLLMLLQGIVYVWKEWFRNKIPL

SEQ ID NO: 80008 - protein, 218 aa, Zea mays
  Coding DNA Sequence Number=SeqID_38229
  Gene Ontology: Mol. function=ribonuclease activity
  Homolog annotation: Hit_ID=Q6Z6A3; Match level="QueryCoverage=56%, HitCoverage=12%, E-value=3e-48, Identity=71%"; Hit description =Putative Ribosomal RNA processing protein
MASSAGGASSSLVKNEPYMRAVKIYLKSLDIQMEKQLAKTWRSTRGHVGTGREIFNAYCSLHMIIYHWLQHVMLLMLLQAKKFKVPSSENLREIAEHCNERKWAGRRAEEAGQKLYMWALIKNKETVVCNARVLGLGPRFMSVYVPKLAMEQRIYYDEVEGLSVEWNKPAQRRGTHMKCRPIEEVAVVVNPSELSEEDEESGPCPDDDVRAVPFQSMG

SEQ ID NO: 80009 - protein, 246 aa, Zea mays
  Coding DNA Sequence Number=SeqID_38230
MEKDRQDALRKRRAYARLADPRREAKVARPIAKPAAPGASMPLPAAPTSERMPPLPLRAAETAVAGTKVSMELSVDDYLVGGVAMFDAHTGLAPAGEFFYKVTVFAERIASGALTSEFSAERRRLEGRIERLRTQHTEAVRDKSTVENKGRNLLEKLTVAETEKEDLSCRLAEEREGTEKARVDAQATRAEADTACAEASLALKRVADAKSGLKSLHNYTEKTEASTHAGVERPHALLVDAYRSDV

SEQ ID NO: 80010 - protein, 519 aa, Zea mays
  Coding DNA Sequence Number=SeqID_38231
MSSPELQESSARMLKVTGGRWPRNVPIPQAADEDIFTSQLARDMKIFPYGRNVGVVVSAVMEKDRQDALRKRRAYARLADPRREAKVARPIAKPAAPGASMPLPAAPTSERMPPLPLRAAETAVAGTKVSMELSVDDYLVGGVAMFDAHTGLAPAGEFFYKVTVFAERIASGALTSEFSAERRRLEGRIERLRTQHTEAVRDKSTVENKGRNLLEKLTVAETEKEDLSCRLAEEREGTEKARVDAQATRAEADTACAEASLALKRVADAKSGLKSLHNYTEKTEASTHAGVERPHALLVDAYRELGAHFEVLDRVTEDFDHGIFQMMNDEEVEDFGGLESSMTRTEGVETGLKGTQRLKPTLAKTLQRRLLRHRWQGRIRVVGFWVSFCDTEGMRIPLSWIEESSKEDLDYFAALDLAASESPPQFDAREESTSSARAIAEDHHRQKVVSKQSVGGMSRSGRRHRMGMERSRLRLDRGSQRDLLSSTAGTCIGEGDLQNLFEGKELRMMLFNFREAVLI

SEQ ID NO: 80011 - protein, 127 aa, Zea mays
  Coding DNA Sequence Number=SeqID_38232
  Gene Ontology: Mol. function=DNA binding; Cellular component =chromosome; Biological process=chromosome organization and biogenesis (sensu Eukaryota)
  Homolog annotation: Hit_ID=Q9C944; Match level="QueryCoverage=84%, HitCoverage=88%, E-value=2e-44, Identity=80%"; Hit description =Probable histone H2A variant 3
  Pfam annotation: Domain name=Histone; Domain location=32-96; Score =56.9; E_value=6.8e-14; Accession=PF00125.14; Description=Core histone H2AH2BH3H4
  Subcellular localization annotation: CTP_CleavageSite=19; ConfidenceScore=5.24e-01
MAGKGGKGLLAAKTTAAKSAEKDKGKKAPISRSSRAGLQFPVGRIHRQLKQRTQANGRVGATAAVYSAAILEYLTAEVLELAGNASKDLKLAIRGDEELDTLIKGTIAGGGVIPHIHKSLINKSSKE

SEQ ID NO: 80012 - protein, 367 aa, Zea mays
  Coding DNA Sequence Number=SeqID_38233
  Homolog annotation: Hit_ID=O23628; Match level="QueryCoverage=26%, HitCoverage=72%, E-value=4e-40, Identity=87%"; Hit description =Histone H2A variant 1
  Pfam annotation: Domain name=Histone; Domain location=263-337; Score =81.0; E_value=3.8e-21; Accession=PF00125.14; Description=Core histone H2AH2BH3H4
  Subcellular localization annotation: CTP_CleavageSite=51; ConfidenceScore=5.05e-01
RKQATPTKRSICSLRCSVSSRARRKVGASSFNAHTSLLARDKLYDGEQPLSAELGEELGKTQPLSGYYSSLLIDGKDRIEDGNRIEVPVTEDPIEIPSIKKPSAPRPDSDIGDPQIFLSFKYLRRLQLFCRYFMYTAKDLEEWLENHDSFRHEQNLVQWTEKKRPYVEALFIVVYIQYVHSHFCSYGPADLVVLKWFHLIRLVSNQIFARVVLEDGISLTEVGGLLQEWDGREEPAGQHALEDSLASEDLGSMLESIKVERAKYSLMCFQFPVGRIHRQLKQRTQANGRVGATAAVYSAAILEYLTAEVLELAGNASKDLKVKRITPRHLQLAIHGDELDTLTKGTIAGGGVIPHIHKSPINKSSKE

SEQ ID NO: 80013 - protein, 123 aa, Zea mays
  Coding DNA Sequence Number=SeqID_38234
  Homolog annotation: Hit_ID=Q94H92; Match level="QueryCoverage=29%, HitCoverage=11%, E-value=3e-08, Identity=72%"; Hit description =Putative dioxygenase
MAEQDGDAGQRPPDSVPVPLEAKACEKGGGDEVVVFFVQIVSIANGMVNPGDQNTNQHQPFFRRCANHFALFSGTFLGANEDSTRTLAEIEKKIARATVLPRNHGEPFQTPPPGPLVSIRKPP

SEQ ID NO: 80014 - protein, 204 aa, Zea mays
  Coding DNA Sequence Number=SeqID_38235
  Homolog annotation: Hit_ID=Q9LJQ4; Match level="QueryCoverage=33%, HitCoverage=16%, E-value=9e-17, Identity=60%"; Hit description =Muconate cycloisomerase-like protein
  Pfam annotation: Domain name=MR_MLE; Domain location=128-202; Score =6.5; E_value=0.0035; Accession=PF01188.11; Description=Mandelate racemase  muconate lactonizing enzyme, C-terminal domain
MPRRGRSGRSLFDIRGEPRPYFILEIVTGAHIPLYSMAEQDGNAGQRPPDSVPVPLEAKACEKGGSDEVVVFFVQIVSIANGTVNPGQNKIRMVIVLICVCSELSDLSICCEWEMGIIGSNSYSNRDSNEPAQLAAEYRGQGFQTLKLKVGKNLNSDIEVQKAIRLVHPDCSFILDANEGYTRNQAIEVLDRLNAILIYNSPKC

SEQ ID NO: 80015 - protein, 150 aa, Zea mays
  Coding DNA Sequence Number=SeqID_38236
  Pfam annotation: Domain name=GRP; Domain location=28-138; Score= -26.4; E_value=0.038; Accession=PF07172.2; Description=Glycine rich protein family
MGVGKGRLGGEWLPSSSINSALASPAFSHFLLLLAISSHLLPSIPPWARARKVWTYIRPVERVGLEGSDESKYSSDEANSSDSSEEGSSGDGDDDGGDGDGGGDGGKGGDGSGKGGSGDGGKGGDGSGKGGSGDGGSGKGSSKGSNKASG

SEQ ID NO: 80016 - protein, 83 aa, Zea mays
  Coding DNA Sequence Number=SeqID_38237
MGVGKGRLGGERLPSSSINSALASPAFSHFLLLLAISSPLLASTSAMGKSKKGGGSLHHSGDKRKREPTPPSEDFGDSEYSEE

SEQ ID NO: 80017 - protein, 127 aa, Zea mays
  Coding DNA Sequence Number=SeqID_38238
  Homolog annotation: Hit_ID=Q8LAK5; Match level="QueryCoverage=34%, HitCoverage=50%, E-value=3e-14, Identity=84%"; Hit description=Small nuclear ribonucleoprotein homolog
  Pfam annotation: Domain name=LSM; Domain location=69-124; Score=23.5; E_value=0.00053; Accession=PF01423.12; Description=LSM domain
  Pfam annotation: Domain name=zf-DNL; Domain location=1-47; Score =19.5; E_value=1e-05; Accession=PF05180.3; Description=DNL zinc finger
  Pfam module annotation: Pfam domain module=LSM::zf-DNL; Domain location=69-124::1-47
MRVAFACSVCGQRTTRAINTHAYTNETMFVQGVQKHEEVSKVKDDNVLSSSWPRAPSRTLSPLSAWRSPLPTTATPHDCELAKGFDEYMNLVLDDAEEINVKKNTRKTLGRILLKGDNITLMMNIGK

SEQ ID NO: 80018 - protein, 168 aa, Zea mays
  Coding DNA Sequence Number=SeqID_38239
  Gene Ontology: Mol. function=sequence-specific DNA binding; Cellular component=nucleus; Biological process=regulation of transcription, DNA-dependent
  Homolog annotation: Hit_ID=Q6Z6W2; Match level="QueryCoverage=50%, HitCoverage=36%, E-value=1e-16, Identity=55%"; Hit description=MADS -box transcription factor 57
  Pfam annotation: Domain name=SRF-TF; Domain location=76-126; Score =71.0; E_value=3.9e-18; Accession=PF00319.9; Description=SRF-type transcription factor (DNA-binding and dimerisation domain)
  Subcellular localization annotation: CTP_CleavageSite=66; ConfidenceScore=5.37e-01
MASKVKDDSVLRVFSWIFNHLKKSSSWPRAPSRTLSLLSAWRSPLPTTATPHDCELVKSIKRHRVLFDEEGKIVVRRIDNSMSRHVTFSKRWNRLLKKMKELSILYDADIGLIIISSTSRLYEFANTKTYRLTFESTKELIDTRSMAFDINILERQTCKSLTTSGPRR

SEQ ID NO: 80019 - protein, 308 aa, Zea mays
  Coding DNA Sequence Number=SeqID_38240
  Homolog annotation: Hit_ID=Q6K7C2; Match level="QueryCoverage=25%, HitCoverage=36%, E-value=8e-31, Identity=83%"; Hit description =Putative OsCTTP
  Pfam annotation: Domain name=ChaC; Domain location=1-86; Score=-16.8; E_value=2.4e-07; Accession=PF04752.3; Description=ChaC-like protein
  Pfam annotation: Domain name=SRF-TF; Domain location=176-226; Score =71.0; E_value=3.9e-18; Accession=PF00319.9; Description=SRF-type transcription factor (DNA-binding and dimerisation domain)
  Pfam module annotation: Pfam domain module=ChaC::SRF-TF; Domain location=1-86::176-226
MISTRKGDPLKPAVTGFLVFVSTPDPIGNKYYLGPAPLQYMARQIATANGPTGYNRDYLFSMEKALASISHEDDSIIDLANEGGGRRVNSSTTSRVSRWTMASKVKDDSVLRVFSWIFNHLKKSSSWPRAPSRTLSLLSAWRSPLPTTATPHDCELVKSIKRHRVLFDEEGKIVVRRIDNSMSRHVTFSKRWNRLLKKMKELSILYDADIGLIIISSTSRLYEFANTKTYRLTFESTKELIDTRSMAFDINILERQTCKSLTTSGPRPEKLREKLRQECLRKGTKLAHGVADALFAVPHTEDKGIEEH

SEQ ID NO: 80020 - protein, 208 aa, Zea mays
  Coding DNA Sequence Number=SeqID_38241
  Gene Ontology: Mol. function=sequence-specific DNA binding; Cellular component=nucleus; Biological process=regulation of transcription, DNA-dependent
  Homolog annotation: Hit_ID=Q6Z6W2; Match level="QueryCoverage=59%, HitCoverage=52%, E-value=1e-16, Identity=42%"; Hit description=MADS -box transcription factor 57
  Pfam annotation: Domain name=SRF-TF; Domain location=76-126; Score =71.0; E_value=3.9e-18; Accession=PF00319.9; Description=SRF-type transcription factor (DNA-binding and dimerisation domain)
  Subcellular localization annotation: CTP_CleavageSite=66; ConfidenceScore=5.37e-01
MASKVKDDSVLRVFSWIFNHLKKSSSWPRAPSRTLSLLSAWRSPLPTTATPHDCELVKSIKRHRVLFDEEGKIVVRRIDNSMSRHVTFSKRWNRLLKKMKELSILYDADIGLIIISSTSRLYEFANTKTYRLTFESTKELIDTRSMAFDINILERQTCKSLTTSGPRPEKLREKLRQECLRKGTKLAHGVADALFAVPHTEDKGIEEH

SEQ ID NO: 80021 - protein, 208 aa, Zea mays; identical to SEQ ID NO: 80020
  Coding DNA Sequence Number=SeqID_38242
  Gene Ontology: Mol. function=sequence-specific DNA binding; Cellular component=nucleus; Biological process=regulation of transcription, DNA-dependent
  Homolog annotation: Hit_ID=Q6Z6W2; Match level="QueryCoverage=59%, HitCoverage=52%, E-value=1e-16, Identity=42%"; Hit description=MADS -box transcription factor 57
  Pfam annotation: Domain name=SRF-TF; Domain location=76-126; Score =71.0; E_value=3.9e-18; Accession=PF00319.9; Description=SRF-type transcription factor (DNA-binding and dimerisation domain)
  Subcellular localization annotation: CTP_CleavageSite=66; ConfidenceScore=5.37e-01

SEQ ID NO: 80022 - protein, 129 aa, Zea mays
  Coding DNA Sequence Number=SeqID_38243
  Subcellular localization annotation: CTP_CleavageSite=69; ConfidenceScore=5.30e-01
MMRVSACRRWSKKGSPKAWDAAHVKLHSCPLHLLMTISSFARSFGAASFFVLFMLLSLWFCFESEGTCSCISTPETLLNHAFEDLRKTKAPNNATTGQHPEELMQGRELLQERIQTRYTTSSTSFSLLE

SEQ ID NO: 80023 - protein, 182 aa, Zea mays
  Coding DNA Sequence Number=SeqID_38244
  Gene Ontology: Mol. function=nucleic acid binding; Cellular component= nucleus; Biological process=mRNA processing
  Homolog annotation: Hit_ID=Q5TKN2; Match level="QueryCoverage=52%, HitCoverage=22%, E-value=8e-37, Identity=82%"; Hit description =Putative polypyrimidine track-binding protein
  Pfam annotation: Domain name=RRM_1; Domain location=93-160; Score =4.7; E_value=0.052; Accession=PF00076.12; Description=RNA recognition motif. (a.k.a. RRM, RBD, or
MNKDILVAADDHEGGLCLPKSSARLTQESGVGYNKASSLSFSAESRRQIHYCRAPLPSLSLRRSVSRRQNPRSLSLLNPLNKCGRMSEPSKVIHIRNVGHEIAESDLLQLLQPFGMVSKIVMLRAKNQALLQMEDLHASVSALQYYTSVQPSIRGRNVYMQFSSHQELTTDQSSHGRNSDQA

SEQ ID NO: 80024 - protein, 304 aa, Zea mays
  Coding DNA Sequence Number=SeqID_38245
  Homolog annotation: Hit_ID=Q6QP51; Match level="QueryCoverage=88%, HitCoverage=98%, E-value=2e-35, Identity=40%"; Hit description =Putative growth-regulating factor 1
MAPRKGSTAAPEHSGFKLITDQGFEGWPLGRVRQPPQSTRAPRPLLIKGSKAGPSEGFDSLPRARRVRDDSGYIRYMAEAWATLPRSRPRLPRDAIPPRPSPASGGNSSPGRIHALPEGLLKRRAHPRLARSPARAGFIVKQPWPNRITNRPYRRRIQCEDRLTPYPDTRASVGKVEVTPRAQQEAPPRPTLGLGSGGGLRLAWPQGSASTSASEGGLRLARPHGSALTSASGGIASSPDPSLGLRRSLRLARPWARTNRATGDTSLPLPLASSGYGGTRLASHLARPGLRHSSDGHVTAYTEL

SEQ ID NO: 80025 - protein, 288 aa, Zea mays
  Coding DNA Sequence Number=SeqID_38246
  Homolog annotation: Hit_ID=Q6QP51; Match level="QueryCoverage=93%, HitCoverage=98%, E-value=2e-35, Identity=40%"; Hit description =Putative growth-regulating factor 1
MAPRKGSTAAPEHSGFKLITDQGFEGWPLGRVRQPPQSTRAPRPLLIKGSKAGPSEGFDSLPRARRVRDDSGYIRYMAEAWATLPRSRPRLPRDAIPPRPSPASGGNSSPGRIHALPEGLLKRRAHPRLARSPARAGFIVKQPWPNRITNRPYRRRIQCEDRLTPYPDTRASVGKVEVTPRAQQEAPPRPTLGLGSGGGLRLAWPQGSASTSASEGGLRLARPHGSALTSASGGIASSPDPSLGLRRSLRLARPWARTNRATGDTSLPLPLASSGYGGTRLASHLARP

SEQ ID NO: 80026 - protein, 91 aa, Zea mays
  Coding DNA Sequence Number=SeqID_38247
MGDFVLGRVRGYVCGQVQSGIRTLILIPISSRRPRIPMDPFPQTNHPYGMKVWVLPKDKHSGLKLGFSLDVLAGCPINLRWILIQILFVQN

SEQ ID NO: 80027 - protein, 137 aa, Zea mays
  Coding DNA Sequence Number=SeqID_38248
MGKPVPSLLMLLVSRGRVPLDCPTRWQDGRPSHSSNHVLQRTCKNYATSKAEYTNTQLDLPGYNGSSSLISCEKQTIRIEFLSLQVTALVPTITGMGDHISGRVRGKVCGQVQSGIRTLILIPISSRRPRIPMDPCP

SEQ ID NO: 80028 - protein, 100 aa, Zea mays
  Coding DNA Sequence Number=SeqID_38249
  Gene Ontology: Mol. function=transcription factor binding; Cellular component=intracellular; Biological process=regulation of transcription, DNA-dependent
  Homolog annotation: Hit_ID=Q5JLU1; Match level="QueryCoverage=89%, HitCoverage=29%, E-value=5e-09, Identity=48%"; Hit description =Putative rab7 protein
MVRLQGRYSILRDLCEGGPQRRHCFSYASLGSPWSMSMTKTCCQILATPRLICSSNHRYAFDICPFCVPPVTSRQLRNKSRTLNRQADVLARSQPFPGRL

SEQ ID NO: 80029 - protein, 155 aa, Zea mays
  Coding DNA Sequence Number=SeqID_38250
  Homolog annotation: Hit_ID=Q3S835; Match level="QueryCoverage=30%, HitCoverage=26%, E-value=1e-18, Identity=85%"; Hit description=RAB7
  Pfam annotation: Domain name=Ras; Domain location=56-135; Score= -92.8; E_value=0.026; Accession=PF00071.12; Description=Ras family
MWMGEDTLNNHAVPEPAQSSLFSLDTREYPNIIVVLVLSWQKYLMHLSMIFLEIELSFCDPRFDTVLQFSALPPRIADLLMCLALRLLLQPSWVPEKKAREWCASKGDIPYFETSAKEDHNVDTAFLCIARLALEHEHDQDMLPNPGDSQIDLQF

SEQ ID NO: 80030 - protein, 111 aa, Zea mays
  Coding DNA Sequence Number=SeqID_38251
  Gene Ontology: Mol. function=transcription factor binding; Cellular component=intracellular; Biological process=regulation of transcription, DNA-dependent
  Homolog annotation: Hit_ID=Q3S835; Match level="QueryCoverage=82%, HitCoverage=50%, E-value=2e-40, Identity=79%"; Hit description=RAB7
  Pfam annotation: Domain name=Ras; Domain location=1-91; Score=-25.8; E_value=2.4e-07; Accession=PF00071.12; Description=Ras family
MSAAHRRSFNTLDTWHDEFLNQADPSDPQRFPFILVGNKIDSDGGSKRMVPEKKAREWCASKGDIPYFETSAKEDHNVDTAFLCIASLALEHEHDQDMLPNPGDSQIDLQF

SEQ ID NO: 80031 - protein, 401 aa, Zea mays
  Coding DNA Sequence Number=SeqID_38252
  Homolog annotation: Hit_ID=Q3S835; Match level="QueryCoverage=19%, HitCoverage=42%, E-value=3e-29, Identity=73%"; Hit description=RAB7
  Pfam annotation: Domain name=Ras; Domain location=252-381; Score= -40.7; E_value=3.2e-06; Accession=PF00071.12; Description=Ras family
MPFARRYALRAARLYPTSPRAPVVATAANVLLADASSHHAALLLPEPDDPDASPLSVSELCRHFKSLIKSLRVGLDATTAAAYPSVAAAAEEALDRATKAYEALTAPAPGTFWTACAGCRLLHEFERKLYRELRSCLDLTGPRDYSSPEEMVQRLTSASTVLRRVLDNPALQDCQENNGFGDMMDEDVISNISLSGRMYRVTFTNRLNGAAGAIFLEIELSFCDPRFGYSVAIFCSPTVRTQDVDRKLLIVLVLVGLTFSVPIVNYFRVFIVNSKLLTDTSCFTVYHICRRIADLLMCLALRLLLQPSWVRQVGPSDPQRFSFILVGNKIDSDGGSKQMVLEKKAREWCASKGDIPYFETSAKEDHNVDTAFLCIARLALEHEHDQDMLPNPGDSQIDLQF

SEQ ID NO: 80032 - protein, 250 aa, Zea mays
  Coding DNA Sequence Number=SeqID_38253
  Subcellular localization annotation: CTP_CleavageSite=88; ConfidenceScore=5.18e-01
MEGAIHSPRPIIGVHYPSKSLAFPVPLPHRWPANPSPPCHRGLNPWPRPTVSWRWPSRSSPRAGTPFARRYALRATRLYLTSPRAPVVATAANVLLADASSHHAALLLPEPDDPDASPLSVSELCRHFKSLIKSLRVGLDATTAAAYPSVAAAAEEALDRATKAYEALTAPAPAKRLFGLEHRTVRWCTGQCPVRQTDSGELAALGNLPATYGYNSPDCPVCTGLSGEPTVGRANGRPRDLRGTRGRANG

SEQ ID NO: 80033 - protein, 110 aa, Zea mays
  Coding DNA Sequence Number=SeqID_38254
MPVLVAARGVAAPAGRHGKFCEARACGAAAVAAGRRLRRRRVTQPIKRRELGTDGAGVVITPTTWIIGKKSILFYNTDYTVTPTCTYVSTLHKNEAVRKPVALALQGAKL

SEQ ID NO: 80034 - protein, 402 aa, Zea mays
  Coding DNA Sequence Number=SeqID_38255
  Homolog annotation: Hit_ID=Q653S9; Match level="QueryCoverage=34%, HitCoverage=19%, E-value=4e-56, Identity=78%"; Hit description =Putative NADPH-cytochrome P450 oxydoreductase isoform 3
  Pfam annotation: Domain name=Flavodoxin_1; Domain location=252-395; Score=136.7; E_value=6.3e-38; Accession=PF00258.15; Description =Flavodoxin
MARRRARRGRDCGRGRNGGGDAGRWLNECHKGTNPQRNRAKSARARCHCIAPKANWPRHPRRGRYSLLAIPGSVRSKFSAFDRLGNPPPPQPAPCSHRRRAARPRLTKLPVPPRRCRNPSRGHEHGHYLRATIPSEPDTPGREPHPAHQAPMDSAASAALKPSALDLLAALLTGRDPEGGAHWASALAENRHLFLLLTTSLAVLVGCGVALLVRRSSAPRAAAAAAQAPPRPLAVKPKDEPDPDDGRQRVIVFFGTQTGTAEGFAKALAEEAKARYDKAVFKVVDLEDYAAEDEEYEEKLKKESIALFFLATYGDGEPTDNAARFYKWFSEGNERGEWLNNLRFGVFGLGNRQYEHFNKVGKVVDQLLAEQGNKISGHINDSCYYSMYDYMLVFPENFCTSH

SEQ ID NO: 80035 - protein, 105 aa, Zea mays
  Coding DNA Sequence Number=SeqID_38256
MGLKATGARSNTMKLDNNAEMNSVDTAGVEDLMDTIEEVKPCWTKPSPKNQPSNGFVTFSLTMGPEYHISRITDAVVVARYLGATFVLLDIRGNELGNKRMGLYL

SEQ ID NO: 80036 - protein, 421 aa, Zea mays
  Coding DNA Sequence Number=SeqID_38257
  Homolog annotation: Hit_ID=O23508; Match level="QueryCoverage=47%, HitCoverage=21%, E-value=2e-09, Identity=25%"; Hit description =Growth regulator like protein
  Pfam annotation: Domain name=DUF246; Domain location=106-359; Score= -90.8; E_value=2.3e-09; Accession=PF03138.5; Description=Plant protein family
MAVDPRQVVAGFLTLSMFVMLGNMIKHDHFSPVTEEMGLKATGARSNTMKLDNNAEMNSVDMAGVEDLMDTIEEVKPCWTKPSPKNQPSNGFVTFSLTMGPEYHISQITDAVVVARYLGATFVLPDIRGNELGNKRKFQDMYNVDKFVRSLDGVVEVIDEIPDEVSAKKPAVIRVPNRVTESFIMDTIQPIFKKNKYLRLAVIFSSVSLRPKETSNKDLDATACLAMFSGLELKHEYSEVARKMLDRLQELSKKSDGKVLAIDLRTDLLEKKSCKTTSGARRKGCYNPNEDDIMPAENKGEFLKSSNADLASALDLEICSQSDVFIPAVAGLFYGHVTAGWKLEKRGICQGMFKLAVRFVDERGSSAPTRARSPAPLSGCPRCVVAWALGSGPLDWEKDVGVPVPPFSACLVSGLMRVGMS

SEQ ID NO: 80037 - protein, 68 aa, Zea mays
  Coding DNA Sequence Number=SeqID_38258
MAAHGAQQHDSRHMVAQILPWSAMSGEGSPSTAPATTKLDAEKTSVHHRDEHVAVLRSIPQLLSPLFL

SEQ ID NO: 80038 - protein, 123 aa, Zea mays
  Coding DNA Sequence Number=SeqID_38259
MAAHGAQQHDSRHMVAQILPWSAMSGEGSPSTAPATTKLDAEKTSVHHRDEHGRAREQGSGFIVPRIPQELAGESLHHPLAEPFNPCGVNHDPFVAREIYGEEISDDSGPHHGGSEDGASAKE

SEQ ID NO: 80039 - protein, 69 aa, Zea mays
  Coding DNA Sequence Number=SeqID_38260
MAPRGSCPKARLRLKVSGNGWPRWPALEWLGRVAQISSELRVVSSQRRLMGFADWIKRYGGMKLGLSHC

SEQ ID NO: 80040 - protein, 69 aa, Zea mays; identical to SEQ ID NO: 80039
  Coding DNA Sequence Number=SeqID_38261

SEQ ID NO: 80041 - protein, 576 aa, Zea mays
  Coding DNA Sequence Number=SeqID_38262
  Subcellular localization annotation: CTP_CleavageSite=27; ConfidenceScore=5.09e-01
MDKDHQGAAQKRQAVVRLHEARPKRPRGAAKAAAPGGSQPPLAAKSAVPASSRAPEAAKAAAAGGSKSVKAAPVSSRVPESCRRQASASPTSPPTLVWKIILLGSALSAGGEIPALTAVRDEAGAVSRRLKELKEALSQLCLPKSRDFRRNMLTPSGKSWPPTASAASWRIRWPALEGERTDLRRQLAEERKKANEALAKAQSAQAEANLARAEGSLARQRAEELEGRLNALQTRVERVEASTRLEAERTRKQLMDSYHELGARTADFEVPDREPRLRCLEWIQEELLALPAIVEGFMSYASLTCKGAMNVLSREGCRHYEVFDQADEDFERDIYKVEDPVVKESAGALYDRMWGPHGREVVRERAETTRGQAVRGERVDDFGALNSAQPDSESNPLVAASETAPELPPETVEGVPDAPATTAAGGGPSPTVAPRAEDPVKMAVQDFGPAHATATANFLVASTVDDGNKSDESASKFSDFGDSGSSVEWTEESSDEDLDYFAALDVAAAEASPPAADAEVVPCSSAGRRRRRAVAKRRVSEADGGEGELRSLFVGEELRIMLFNYREMGIIPKVEP

SEQ ID NO: 80042 - protein, 105 aa, Zea mays
  Coding DNA Sequence Number=SeqID_38263
MALTLSERPQAGIPSKARLQANVWLSVSMMNMEKVKMLASATQTRHITSVAIRTHKGVQVSVGAADKCPAQLGRQAGVQEQCCCRSHLAGVLRLDLSARACSLRP

SEQ ID NO: 80043 - protein, 124 aa, Zea mays
  Coding DNA Sequence Number=SeqID_38264
MALTLSERPQAGIPSKARLQANVWLSVIDEYEEQLRRRAQAGLWVLLLLGLLALVVLAHHVLFDAEPAVSLWRRLQLEAGGAWDTDRGSGGTSPWAVAAAVALLLVLASHKSSFQVFRPPFYHK

SEQ ID NO: 80044 - protein, 135 aa, Zea mays
  Coding DNA Sequence Number=SeqID_38265
  Homolog annotation: Hit_ID=Q9SAC6; Match level="QueryCoverage=41%, HitCoverage=4%, E-value=1e-14, Identity=63%"; Hit description=Alpha -glucan water dikinase 1, chloroplast precursor
MTSQGPASNEVLVIVFQRLSPRSVTVCRAVCLRLSELLSSLRLEFLADVDDGNADSSACFAGLGGASAGCARRRRRRRDWILPSRQPDRTTVYKNRALRTPFVKLGHNSTLRIEIDDHVVQDIESLIFDDTHNKW

SEQ ID NO: 80045 - protein, 101 aa, Zea mays
  Coding DNA Sequence Number=SeqID_38266
  Homolog annotation: Hit_ID=Q9SAC6; Match level="QueryCoverage=41%, HitCoverage=3%, E-value=9e-09, Identity=64%"; Hit description=Alpha -glucan water dikinase 1, chloroplast precursor
MQFPAVCLRLSELLSSLRLEFLADVDDGNADSSACFTGLGGASAGCARRRRRRRDWILPSRQPDRTTVYKNRALRTPFVKLGHNSTLRIEIDDHVVQDNKW

SEQ ID NO: 80046 - protein, 244 aa, Zea mays
  Coding DNA Sequence Number=SeqID_38267
  Homolog annotation: Hit_ID=Q6EU00; Match level="QueryCoverage=31%, HitCoverage=20%, E-value=2e-22, Identity=71%"; Hit description=TRNA -splicing endonuclease positive effector-like
MYSVVVRHFLHEASFSIGVVCPYNAQVRAIQEKVGKACRRNDYFSVKVKSVDGFQGAEEDIIIISTVRSNGAGTIGFLSNLQRTNVALTRAKLGKTLHSTTLLYTLLCQGFDDKPMVKRAVIVTPTSLVSNWESEIIKWLKGRVQSKQQQIVGSKHLVSDSLLERLINCLLFGSNQFCIIGNKLCLRDWILPSRQPDRTTVYKNRALRMPFVKLGHNSTLRIEIDDHVVQDIESLIFDDTHNKW

SEQ ID NO: 80047 - protein, 208 aa, Zea mays
  Coding DNA Sequence Number=SeqID_38268
  Gene Ontology: Mol. function=hydrolase activity; Biological process =mRNA catabolic process, nonsense-mediated decay
  Homolog annotation: Hit_ID=Q6Z6G1; Match level="QueryCoverage=38%, HitCoverage=8%, E-value=1e-34, Identity=93%"; Hit description =Putative DNA repair protein rhp54
MYSAVVIKSVYVWAGYNVFAFLSIVETLSTRSKLSIGVVCPYNAQVRAIQEKVGKACRRNDYFSVKVKSVDGFQGAEEDIIIISTVRSNGAGTVGFLSNLQRTNVALTRAKLGKTLHSITLLYTLLCQGFDDKPMVKRAVIVTPTSLVSNWESEIIKWLKGRVQVLALYESTRADVLSGIESFLKPLSRLQGEELRKHIGATCYIECS

SEQ ID NO: 80048 - protein, 208 aa, Zea mays
  Coding DNA Sequence Number=SeqID_38269
  Gene Ontology: Mol. function=nucleic acid binding
  Homolog annotation: Hit_ID=Q6Z6G1; Match level="QueryCoverage=38%, HitCoverage=8%, E-value=2e-35, Identity=93%"; Hit description =Putative DNA repair protein rhp54
MYSAVVIKSVYVWAGYNVFAFLSIVETLSTRSKLSIGVVCPYNAQVRAIQEKVGKACRRNDYFSVKIKYLDGFQGAEEDIIIISTVRSNGAGTVGFLSNLQRTNVALTRAKLGKTLHSITLLYTLLCQGFDDKPMVKRAVIVTPTSLVSNWESEIIKWFKGRVQVLALCESTRADVLSGIESFLKPLSRLQGEELRKHIGATCYIECS

SEQ ID NO: 80049 - protein, 425 aa, Zea mays
  Coding DNA Sequence Number=SeqID_38270
  Gene Ontology: Mol. function=cysteine-type peptidase activity; Biological process=proteolysis
  Homolog annotation: Hit_ID=Q109R5; Match level="QueryCoverage=86%, HitCoverage=35%, E-value=2e-52, Identity=33%"; Hit description=Ulp1 protease family, C-terminal catalytic domain containing protein
MECLFHGDIQLSDEALSANIHCIRGEEHLLQREGGKVFLENTFISSLLKRDGNPKMLLNCKEDTIEKRVDNYLQSDMVFLPMNIENFHWYLAVLNAKKSELKGLERQIKLAAEHKELYQGKWSNLDVASWPVIEKITTQMQTDGVSCGLWMINYMEYWTGSSLSDNVTQDDITMFRFKLPAILWDSRLNTKKRHQNLDHNVDEDGESSSDVQIIDTPCELSKSSNTSHQIEPYISPYVLPAKVTSTNMQELMFVLCTYIMGIDNAKYLKKHWIQSTKPYPISLSLQKLKDILDVNKPMDTDCFNMAVRMIACNDVLFLLEDKYNYMDLQFCSITKFGRDPRLRAKPDINMLAKLLECWPDMEYDVSDCKQGFIWLSCYQLYARLEWYKNGNDLRTKFLVELLKYKDNESKDNIPEEIQEIIRHIR

SEQ ID NO: 80050 - protein, 63 aa, Zea mays
  Coding DNA Sequence Number=SeqID_38271
MGSKNIKLGFIWLSCYQLYARLEWYKNGNDLRTKFLVELLKYKDNESKDNIPEEIQEIIRHIR

SEQ ID NO: 80051 - protein, 139 aa, Zea mays
  Coding DNA Sequence Number=SeqID_38272
MAHRTVRCTPDSPVPLATSSLPLDSTVEASDLWARLGVRCTPDIYCSLSGVPEWARLPSARAERALNARQRAVGAEKTVAPESHRTVRFALFTPPLGDFQRPSTFAATSGQEGEPPHKERATVLRLFALPSSPQPAVKE

SEQ ID NO: 80052 - protein, 383 aa, Zea mays
  Coding DNA Sequence Number=SeqID_38273
MTAVMAASMHAPFRRGPRPRPPMVGDNEAIKAKEWEARRQVALVVSPAEATTSATGSLTSGGDHLSTDDNGHLCTGGLPATAAVLTACRKVLAPILLQAVPRLAAGGGAGGGTKAIQAKEPDTRQLTAPAAGRLRVAEVCLLRKAARMMNILEAEGRGRPQPGSLLSTTRLVPGCMMKIFEAERWQKSANTHEVVLLQQQQGGDKIGSTTAQETNSTSSPVADFPAHALKRHGQGLPRCAPGFPFYDMGARPHTSYKLARSAKKANRCTGSVQPPCGYTPFHLRRNQRSRRRIAAQGACNRPAVIRPSIFTTTSGQGGEPPHKEHATAPRLRAPSASLQPVVQPLAWGPRATCHTPGAPVSGCRKVAPPLAPISRLLESVAED

SEQ ID NO: 80053 - protein, 120 aa, Zea mays
  Coding DNA Sequence Number=SeqID_38274
MTSGQTLLRQGPRPRPHSRGEDKQKAVELELRAGQRPQTGSLLPTIRLVVTVLGDHLSAFRDRGGSLGRRVKCRRVPQPRWVGARSSAKGGRKSAGDGRERGGNPAAFVFVPRPGRVHLQ

SEQ ID NO: 80054 - protein, 421 aa, Zea mays
  Coding DNA Sequence Number=SeqID_38275
  Subcellular localization annotation: CTP_CleavageSite=64; ConfidenceScore=5.22e-01
MHRVFPPSEPPDGGRPRFFCLVVVGGTQLRGSWYLSAIVRLQGFSSGSPAVSPRRWSPKTVTTSSMVGRSEPGCGLCPALSFKDLHHPCWGGERGEPGLYLPHGSAGHLFFQLLVVETILQLYGGGVLQPCRERRTVAAQLGCNIPSSVLAFVADAAVGADVVAAGESFSAVEAVSAAYGPTSGSLALMSGSRPLSGDANESLPLAASVLGPWLLQQRSLASRPELVAPQALRCGGCSYPRGRNRSSVCNGTLNAGNPRPLFDEPKPEAAVLAWTEAEFARKEDFVGPSLAGPSTSGTSAGVELPKPRAGLVSSEDSWLRLRGGRPSHPPTVLPSEARSDFAEGGVDAEGAAAPPPSTSEPAGSVHLVVIVCPSKSYFSRKVMSEKVMSEVSVSQRHRSPSALSALAAYVYSVIFRIPLSK

SEQ ID NO: 80055 - protein, 123 aa, Zea mays
  Coding DNA Sequence Number=SeqID_38276
MVSSAEATASVVGSLTYGGHHLSTDDSGHLRTNAAPADGGRPSVHKEVLTLVLATGVRTRPSKDADTAPVAYDVLYSPPVRPAARKGHGCSRPTHDTIVARVVDGQPHPDQAAGGSSPPPQGW

SEQ ID NO: 80056 - protein, 74 aa, Zea mays
  Coding DNA Sequence Number=SeqID_38277
  Subcellular localization annotation: CTP_CleavageSite=39; ConfidenceScore=5.05e-01
MGKPVPSLLMLLLCRVTALVSTITGMGNNVSGRVRGKVCGQVHSGIRTLILIPISSRRPRIPMDPCPQTIIVLI

SEQ ID NO: 80057 - protein, 49 aa, Zea mays
  Coding DNA Sequence Number=SeqID_38278
MGDHVSGRVRGKVYGQVHSGIRTLILIPISSRRPHIPMDPCPQTIIILI

SEQ ID NO: 80058 - protein, 115 aa, Zea mays
  Coding DNA Sequence Number=SeqID_38279
MGKPVPSLLMLLLSRGRVPLDCPTRWQDGRPSHSRNHVLQRTCRNYATSKAEYTNTQLDLPGYNGSSSLISCEKQTIRIEFLSLQGIRTLILIPISSRRPRIPMDPCPQPNISMI

SEQ ID NO: 80059 - protein, 73 aa, Zea mays
  Coding DNA Sequence Number=SeqID_38280
MGDHVSGCVRGKVCCQVHSGIRTLILIPISSRRPRIPMDPCPQTMIIPGSKWIQPTPDLARVLEKSLDFYRDL

SEQ ID NO: 80060 - protein, 315 aa, Zea mays
  Coding DNA Sequence Number=SeqID_38281
MVLGFIISKRGIEANPEKIATIAQHPKPSLGAPGGYTHPRERPLVIAKVLKPGTYKLANSQGEPRLTEPRDSYASGIRIPHSSPSAIKPHGRVKVRVSGKADRAEGLPRLRDTDTSLITFREKQLSLAQTSLLSTKQYRYSKQEEKRRGFTTQRGCVFWPRRPQKAHATRHSDPAGSGLGAGRGSSTLGIDDTFGEVRPSLGRRLSPRISAPKDDVIATPGQSLPGSSPGIRPEQAAQPVTPGASTNHLPRAPARPEASAANSAPVHADIATPGLGSSKSGQGVPLTKLEKPQTTRPTEPRDSYASGIRIPHSSP

SEQ ID NO: 80061 - protein, 181 aa, Zea mays
  Coding DNA Sequence Number=SeqID_38282
MVTSSLMVGESEPGCGLCPSLSLKDFHHQGWGGDCSVLGFRTRVASEPLAAPASATTAGRGSSTDEIARAAHGPTSNSTAFCPSLPHKFGHGRGPPSSSTRPEVSAAAVRPPGAEVVVVAAAGAGDGTPFIGLLLLRRPSPMEWGYSPVGCLNRFTKHESPRVKVTSEGPLGRSSMSRGQG

SEQ ID NO: 80062 - protein, 606 aa, Zea mays
  Coding DNA Sequence Number=SeqID_38283
  Gene Ontology: Mol. function=cysteine-type peptidase activity; Biological process=proteolysis
  Homolog annotation: Hit_ID=Q109R5; Match level="QueryCoverage=56%, HitCoverage=36%, E-value=3e-54, Identity=32%"; Hit description=Ulp1 protease family, C-terminal catalytic domain containing protein
MDIVVEKGNVDVGNTAEPSYEVVARSGCSAQLSTNDTDEHELESEDSKVSVGNAAKQSHDVVGVGIDCIFNHVKVSTEADLGPQPDVIHLTSLDVPNESSQLSSDADMVKQNQQDALDTLIRISQHKKPKKLNVARVVSEDYKCTPEDVQLIEYIKTLPGKQVVVNIDSAWLNRNDMECLFHGDMQLSDNVFLPMNIEDFHWYLAVLNAKKSELKGLERQIKLAAKHKELYQGKWSNLDVASWPVIEKITTQMQTDGVSCGLWMINYMEYWTGSSLSDNVTQDDITMFRFKLPAILWDSRLNTKKGHQNLDHNVDEDGESSSDVQIIDTPLTSTNTQELMFVLCTYIMGIDNDKYLKKHWIQSTKPYPISLSFQKLKDILDVNKPMDTDCFNMAVRMIACNDSLFLLEDKYHYMDLQFCSITKFGRDPRLRAKPDINMLAKLLECWPDMEYDVSDCKQILLPFSFLGHFTLYVLNMDTRSIYIMDSMPIPSWFKGDHPSMHYIHNIHYIANNMNAAMELANPTWKDDIYMWRRIVPTWVPRTLNWDLSGFLVINFMHDWNGIRLPCICTNGNDLRTKFLVELLKYKDNESKDNIPEEIQEIIRHIR

SEQ ID NO: 80063 - protein, 158 aa, Zea mays
  Coding DNA Sequence Number=SeqID_38284
  Gene Ontology: Mol. function=cysteine-type peptidase activity; Biological process=proteolysis
  Homolog annotation: Hit_ID=Q6JAG6; Match level="QueryCoverage=80%, HitCoverage=29%, E-value=1e-07, Identity=28%"; Hit description =Putative small nuclear ribonucleoprotein
MEYDVSDCKQILLPFSFLGHFTLYVLNMDTRSIYIMDSMPIPSWFKGDHPSMHYIHNIHYIANNMNAAMELANPTWKDDIYMWRRIVPTWVPRTLNWDLSGFLVINFMHDWNGIRLPCICTNGNDLRTKFLVELLKYKDNESKDNIPEEIQEIIRHIR

SEQ ID NO: 80064 - protein, 92 aa, Zea mays
  Coding DNA Sequence Number=SeqID_38285
MVAALFGIMQRSEKQIAIFFKEKKKIRTVVESKDRRISVALAFAGHQEEQCSVPMHVPLRPWQQQGYGNSDVVSLVDLIQILNHKDCFCIFG

SEQ ID NO: 80065 - protein, 301 aa, Zea mays
  Coding DNA Sequence Number=SeqID_38286
  Homolog annotation: Hit_ID=Q2RBN7; Match level="QueryCoverage=23%, HitCoverage=4%, E-value=2e-33, Identity=100%"; Hit description =Clathrin heavy chain, putative, expressed
  Pfam annotation: Domain name=Clathrin; Domain location=41-211; Score=- 0.2; E_value=0.0037; Accession=PF00637.10; Description=Region in Clathrin and VPS
  Pfam annotation: Domain name=Sterol_MT_C; Domain location=99-187; Score=-25.2; E_value=1.7e-05; Accession=PF08498.1; Description =Sterol methyltransferase C-terminal
  Pfam module annotation: Pfam domain module=Clathrin::Sterol_MT_C; Domain location=41-211::99-187
MVAALFGIMQRSEKQIAIFFKEKKKIRTVVESKDRRISVALAFAGHQEGYSLHMPFTQKEPFRSKLSTISTSFQQGDFMNMPIADNTFDAAYAIQATCYAPEAHLTVKAEIELGDGLPDIRTTRQCVQAMKDAGFEVVFAKDLAQAFSLPMDPTLAVVAYRRGQCDDELINVTNKNSLFKLQARYVVERMDGDLWDKVLQPENEYRRQLIDQVVSTALPESKMDASQASNGELHTSVLNHTESIRTLIWRLRPTRPSRQVGQSTEQTLLMLQGALIGAQNVQLSWGTSLSNKETQMKWLIF

SEQ ID NO: 80066 - protein, 330 aa, Zea mays
  Coding DNA Sequence Number=SeqID_38287
  Subcellular localization annotation: CTP_CleavageSite=47; ConfidenceScore=5.14e-01
MTGGSMGHDRKGCTHRAKDGDGHAVLVVPSRSVFAHRPPTPKRSGLRGGSRASACCGPESHGRASSTRKYSLYSVLMGLILAWNIFQNHFGANIVVTRGPLSCRDGSYPPYYAANITSRYFFYCKNPQCRLQAKHKGITSQIEIENLSMLKTKNVKVKDIDTAYCSSQVHGTISQRRMVIVWRCEISEPLPRSTRSFLSIPDSIIVSTTFNFPTFIKDASLANTFLYIAHFLQTRDLQFDQWEFLPIFISNYAINMLIYITKEKLARVEVSSQAPRRSINLSMEPIISREQVRFMQSAGTNITTIAVVNIIIRSGDPMEIISAIRGTSIY

SEQ ID NO: 80067 - protein, 254 aa, Zea mays
  Coding DNA Sequence Number=SeqID_38288
MVQEITGLPFPAPLLLRCLGGCHRRSAQMDACARVCAPELNLDTSAFSLLDRALVIEHKPYDRRADVFSFAIVLWELLTHKEPIEERTSTICIIKYHLRHHYWALLYDHVIRSPYNIKNIEKKKYSLYSVLMGLILSLNIFQNHFGANIVVTRGPLSCHDGSYPPYYAANITSTYFFTKHKGIASQIEIENPSLVKTKNVKVKDIDKGWPFFRLLIALLKFMEPYPRGALRIGHRIRIGQLQLQEDILQYSSEF

SEQ ID NO: 80068 - protein, 136 aa, Zea mays
  Coding DNA Sequence Number=SeqID_38289
MPQRGQKLQRSTQLRNPNGWGDVAAHRTRKQCLSGGAPGLSGAKGSTQTNKKIKLRVQKKGAKEVEENPGLAHRTGRVRNPETTDQAKVGGKKSFEVPSAWEKVKETRNPKPGVNKKTCKVKVDRVKSYGASRITT

SEQ ID NO: 80069 - protein, 73 aa, Zea mays
  Coding DNA Sequence Number=SeqID_38290
MSKKWSNQDLGTSTSRVIETTDQAKDGGKKSFEVPSAREKVKETRNPKPGVKKKTCKVKVDRVKSYGASRITT

SEQ ID NO: 80070 - protein, 121 aa, Zea mays
  Coding DNA Sequence Number=SeqID_38291
MVKGENLCIKAYLDLRGKLILSVKRVKINFLCAKGLKGVSLRSYDLKEECVSFVDNTNHMLLVVLYETTDQAKDGGKKSFEVPSAREKVKETRNPKPGVKKKTCKVKVDRVKSYGASRITT

SEQ ID NO: 80071 - protein, 88 aa, Zea mays
  Coding DNA Sequence Number=SeqID_38292
MVKGENLCIKAYLDLRGKLILSERKAYLKCEEETTDQAKDGGKKSFEVPSAREKVKETRKPKPEVKKKTCKVKVDQVKKSYGASRITT

SEQ ID NO: 80072 - protein, 86 aa, Zea mays
  Coding DNA Sequence Number=SeqID_38293
MEELSSAMDNLQVYYNTLHEEVHVLYSQLHPNVPADPVGMEAGPSRVAGEALGGQDIDVILGMNWLAQHKAILNPDLRTIRLSYDQ

SEQ ID NO: 80073 - protein, 212 aa, Zea mays
  Coding DNA Sequence Number=SeqID_38294
MKESLIIEKPYLDSLNQHTLESLFFSRVRKRQIFVASVLRWYQRKNARNEVREERTLHLELLCKNLSGGVFASLGKFMKLLPHSRNSDACNVCVTGETLLGKGERIYKLRAAIRYLQDELAKRDLALEWAVNSRPLAWAKEAKAQARMEEHSSAMDNLQVYYNTLHEEVHVLYSQLHPNVPADPVGMEAGPSRVAGEALGGELNLFRTPSLY

SEQ ID NO: 80074 - protein, 321 aa, Zea mays
  Coding DNA Sequence Number=SeqID_38295
MAIIFNTLLNFNAGEIFHFGSISCIADQEGVKGSHSANKKIKFWIEQRSKKATEGTSGLGAPDCPVYTGQCPRAQMSGTPILAHRTSNSTCPVCTGHPGGPRSQKLQRSESNGIGDVARAPDMSGVHRTVRCAIEQTASTKLDRWWRLSVRWRTGQSGAHRTCPVPQPRHQCRWILTVGASDFWARLDVRCTPDMYCWMSGAPVWACLTSARATRALNASQVAVGAEIVVAPRMHRTCPVNYSGASFVKSRGWRVLEPRPVGAPDTVRCTPDSPVNYSAPAPDFPEAEEFELESSGAPDTVRWCTGHCPVYTGQSGAPRPE

SEQ ID NO: 80075 - protein, 321 aa, Zea mays
  Coding DNA Sequence Number=SeqID_38296
MAIIFNTLLNFNAGEIFHFGSISCIADQEGVKGSHSANKKIKFWIEQRSKKATEGTSGLGAPDCPVYTGQCPRAQMSGTPILAHRTSNSTCPVCTGHPGGPRSQKLQRSESNGIGDVAGAPDMSGVHRTVRCAIEQTASTKLDRWWRLSVRWRTGQSGAHRTCPVPQPRHQCRWILTVGASDFWARLDVRCTPDMYCWMSGAPVWACLTSARATRALNASQVAVGAEIVVAPRMHRTCPVNYSGASFVKSRGWRVLEPRPVGAPDTVRCTPDSPVNYSAPAPDFPEAEEFELESSGAPDTVRWCTGHCPVYTGQSGAPRPE

SEQ ID NO: 80076 - protein, 278 aa, Zea mays
  Coding DNA Sequence Number=SeqID_38297
  Gene Ontology: Mol. function=sugar porter activity; Cellular component=integral to membrane; Biological process=carbohydrate transport
  Homolog annotation: Hit_ID=Q688W0; Match level="QueryCoverage=92%, HitCoverage=82%, E-value=2e-54, Identity=61%"; Hit description =Putative integral membrane protein
  Subcellular localization annotation: CTP_CleavageSite=59; ConfidenceScore=5.46e-01
MASDGDHGGALQKPLLPKAPRSGGWFRKGTSTARLGAAAAGTSSKAAALRPPHHVPALLCTLVVALGTVQFGFTSGYSSPAQDGVTRDLDLSISEFSVFGSLSNVGAMVGAIASGQMAKYVGRRGSLMIAAVPNVMGWLAISLARDTSFLYVGRLLEGFGVGVISYVVPVYVAEISPQNMRGALGAVNPVASSKLQISSFGMTLSLLVVAVVFYIKDNISHDSDLGNTLSMVSLVGVLAYVTAYSFGMGAIPWIIMAECRIAYELPNLTSYICFQIVQ

SEQ ID NO: 80077 - protein, 163 aa, Zea mays
  Coding DNA Sequence Number=SeqID_38298
MASIIGAEVVAAEEILVADGITATIRALSLQLFGFDSLSSPLEWRRGRGHCCSGVRPEAIAAAVWPPGAEVVVAAAGAGGAEAGGSGVSTDRGGVGSKRRLRRPEPGRAIHLRDQRRSRVAEAMSRAGVLGGQLAEASRRPAEPSARAGFLEETLAVMARAQC

SEQ ID NO: 80078 - protein, 355 aa, Zea mays
  Coding DNA Sequence Number=SeqID_38299
  Subcellular localization annotation: CTP_CleavageSite=42; ConfidenceScore=5.18e-01
MAEDATIVRLQGFSSGSPAASPRRWSPKTVTTSSWVGRSEPGCDLGPALSFKDLHHPGWGGGQAESELYLSRGFVGHLLPQHSRERALTGLAGGSDFDNTGLVGGERRQLQRVGLAGSALGAPSRRKSGCRATRTGGPPKTSRAARAAFVFWGCPAFAPVRRFCAEVAASALRPSPLRFGHLERRLLSLLLERATGLNMDPRPLFDEPKPEAAVSARTEAELARKEDFVGRSLAGPSTGGTDAGVESPRPRAGLMSLGDSWLRLQGGRPSRLLGLDSWRRPWRRWPGRGADVVLWSGDPPTALPSEARSDFAEGVVDAEGAAAPPPSRSEPAGSVYLVACESLGSVSLAAYVYSY

SEQ ID NO: 80079 - protein, 276 aa, Zea mays
  Coding DNA Sequence Number=SeqID_38300
  Gene Ontology: Mol. function=glycine hydroxymethyltransferase activity; Cellular component=vacuole; Biological process=L-serine metabolic process
  Homolog annotation: Hit_ID=Q8RYY6; Match level="QueryCoverage=87%, HitCoverage=40%, E-value=1e-128, Identity=91%"; Hit description =Putative hydroxymethyltransferase
  Pfam annotation: Domain name=SHMT; Domain location=1-224; Score=66.1; E_value=3.6e-20; Accession=PF00464.10; Description=Serine hydroxymethyltransferase
MGDQEVAGEIERKQGRSRGDVNCVHKKPFTLCIMECRSPFDYCDVVTSTTHKNLRGPRGGIIFFRKGKNLRKRAGSFSQGDENEYDFEDRINFGVFPSMQGGPHNNHIAALAITLKQVATPEYKAYIQQVKKNAQALASALLRRKCRLVTGGTDNHLILWDLRTLGLTGKIFEKVCEACHISINKTPIYGDNGSISPGGVRIGTPAMTTRGCLEEDFESIADFLIRSTQIASNVLKEHGKVQKEFLRGLMNNKDVMELRNQVEAFASQFAMPGFDV

SEQ ID NO: 80080 - protein, 139 aa, Zea mays
  Coding DNA Sequence Number=SeqID_38301
MGSTHIAFVLLLLEERNFAEVGTLQPSLDFKDFHQVTSQVSISRRHRTPSARSGLPLKASLAQLRNPRLLCDEPEPEAAVSAWTEAELARKGVSSAQEQVASQAEEVQQRRPEPGRVIRERDHLRSHAAEVVSQADVLV

SEQ ID NO: 80081 - protein, 139 aa, Zea mays
  Coding DNA Sequence Number=SeqID_38302
MGSTHIAFVLLLLEERNFAEVGTLQPSLDFKDFHQVTSQVSISRRHRTPSATSGLPLKASLAQLRNPRLLCDEPEPEAAVSAWTEAELARKGVSSAQEQVASQAEEVQQRRPEPGRVIRERDHLRSHAAEVVSQADVLV

SEQ ID NO: 80082 - protein, 94 aa, Zea mays
  Coding DNA Sequence Number=SeqID_38303
MGRKWNELLSSAPRTGEAAEDEDAARMSREGKVSVTSNPEEMPTMSVPRSRRPDLDLTIDDFEEDEIDPELRYSFQRNSKQLPITLATCTIIRA

SEQ ID NO: 80083 - protein, 434 aa, Zea mays
  Coding DNA Sequence Number=SeqID_38304
  Gene Ontology: Mol. function=GTPase activity; Biological process =immune response
  Homolog annotation: Hit_ID=Q9FNL5; Match level="QueryCoverage=61%, HitCoverage=29%, E-value=9e-53, Identity=53%"; Hit description =Similarity to guanylate binding protein
  Pfam annotation: Domain name=GBP; Domain location=6-204; Score=-12.6; E_value=1e-06; Accession=PF02263.9; Description=Guanylate-binding protein, N-terminal domain
  Pfam annotation: Domain name=GBP_C; Domain location=205-404; Score= -140.0; E_value=0.019; Accession=PF02841.5; Description=Guanylate -binding protein, C-terminal domain
  Pfam module annotation: Pfam domain module=GBP::GBP_C; Domain location=6-204::205-404
MGRKWNELLSSAPWRTGEAAEDEDAARMSREGKVSVTSNPEEMPTMSVPWSRRPDLDLTIDDFEEDEIDPELRYSFQRNSRGPCYASDTFGVRRADDTVLPLLQEFYLDLAEDNRKITPRDYLELALRPVQGGGRDISAKNAIRDSIRALFPDRECFTLVQPVNNEKDLQRLDQLPQISYVAEFRSGLDGFMKFVLDRTRPKQLEASTMTGPILAGLTQSFLDAINNGVVPTISSSWQDYKRNAFLEADLQCSNKVQNMESKVRAACNSSNEKLDDIVRLLDDLLKEYESTAYGPGKWKRLATFLQQWYSPLQLSCWLMWNDLIISHNHFFLCWNEHCSLAGPVLDLFRRQLEHIDAERNALRLKCNSRDVELSEKDKNVGTHVLNVKFDGTHVLNLKNVGAVELTSLSSSKNRRRLYSSVNPRSYGKFDGLLH

SEQ ID NO: 80084 - protein, 82 aa, Zea mays
  Coding DNA Sequence Number=SeqID_38305
MQESLAGPPSQQNPPEGLPTLTTPLLPLPLSDNKSVIMNNVSSYPKPHKALAGVLALNGGDYRSVLDEVRNQGEVNAGETNL

SEQ ID NO: 80085 - protein, 205 aa, Zea mays
  Coding DNA Sequence Number=SeqID_38306
  Subcellular localization annotation: CTP_CleavageSite=57; ConfidenceScore=5.01e-01
MQESLAGPPSQQNPPEGLPTLTTPLLPLPLSDNNSVIMNNVSSYPKPHKSTSKYYPKSSVVNKHWTGAHLNRNIGGSGSVIDGHDFKTQDLISPARSGLDGPHHPNPIVPLDLISTAHLNPTAKGGPPNPVESRRRSEITRRRELPRRTHAGVRANRAPEPQQPTRKNLHAVENIADEVGDILPEVGRRGWQSTEKAGLRRSSKH

SEQ ID NO: 80086 - protein, 120 aa, Zea mays
  Coding DNA Sequence Number=SeqID_38307
MEAPTLLTTVRRIRGGRGVSVEQLPAHQCLSAADDSKITSTSHGRTLGRRSEGRSPRPPGPRFQILGHLSQSGERAGSRYGTRLSGYTAPDHPRRQAFGYGTKLSGHTAPDHPMERAPVL

SEQ ID NO: 80087 - protein, 122 aa, Zea mays
  Coding DNA Sequence Number=SeqID_38308
MATLEPSTWWSRVLFTTWLEIVAWAPRLHAIERGTPISGYRQWPSGPPQGRMRACSALTRRARAVSLPPVISTVVSIIAADLTHGPQEDTRRRVVERAGSRYGTRLSGYAAPDHPRRQVSIL

SEQ ID NO: 80088 - protein, 75 aa, Zea mays
  Coding DNA Sequence Number=SeqID_38309
MATLEPSTWWSRVLFTTWLEIVAWAPRLHAIERGTPISGYRQWPSGPPQGRMRACRPTGRAYEGGPHWAGILKGK

SEQ ID NO: 80089 - protein, 76 aa, Zea mays
  Coding DNA Sequence Number=SeqID_38310
MARVARTLLATDRLKGVVYSRVARTCSCSGGSMGIVDIKVRKRQIFVAFAPRWYQMKENRSEDAGGLGPPYRIFLF

SEQ ID NO: 80090 - protein, 76 aa, Zea mays
  Coding DNA Sequence Number=SeqID_38311
MARVARTLLATDRLKGVVYSRVARTCSCSGGSVGIVDIKVRKRQIFVAFAPRWYQMKENRSEDAGGLGPPYRIFLF

SEQ ID NO: 80091 - protein, 94 aa, Zea mays
  Coding DNA Sequence Number=SeqID_38312
MAAPSLSRGGCRRHLTLGARPQPCRAPALGPHWFWERSVLCAERGSTFGGGATDAARQERERVDAPGAAAAARAVAVPPHRPPRPAGDVPFQIQ

SEQ ID NO: 80092 - protein, 67 aa, Zea mays
  Coding DNA Sequence Number=SeqID_38313
MAGRDAVCGGGKDAYLDLEWDVAGRARRAVGRHCDCTGGGGGAGRVHALTLLARCILDVDGHGWGPA

SEQ ID NO: 80093 - protein, 162 aa, Zea mays
  Coding DNA Sequence Number=SeqID_38314
  Gene Ontology: Mol. function=transferase activity; Biological process= paclitaxel biosynthetic process
  Homolog annotation: Hit_ID=Q9FTG9; Match level="QueryCoverage=88%, HitCoverage=33%, E-value=2e-63, Identity=82%"; Hit description =Taxadienol acetyl transferase-like
  Subcellular localization annotation: CTP_CleavageSite=64; ConfidenceScore=5.58e-01
MDAAPPTITKSPPSLVPPAGPTPGGSLPLSSIDKTAAVRVSVDFIQVFPAPTSGKEDWSPSSAIAAMREGFARALVPYYPIAGRIAEPVPGEPEIECTGEGVWFVEAEASCSLEEARNLERPLCIPKEELLPRPPAGVRVEDTLLLAQDHIDVSANNIINRP

SEQ ID NO: 80094 - protein, 163 aa, Zea mays
  Coding DNA Sequence Number=SeqID_38315
  Gene Ontology: Mol. function=transferase activity; Biological process= paclitaxel biosynthetic process
  Homolog annotation: Hit_ID=Q9FTG9; Match level="QueryCoverage=89%, HitCoverage=33%, E-value=1e-63, Identity=82%"; Hit description =Taxadienol acetyl transferase-like
  Subcellular localization annotation: CTP_CleavageSite=64; ConfidenceScore=5.58e-01
MDAAPPTITKSPPSLVPPAGPTPGGSLPLSSIDKTAAVRVSVDFIQVFPAPTSGKEDWSPSSAIAAMREGFARALVPYYPIAGRIAEPVPGEPEIECTGEGVWFVEAEASCSLEEARNLERPLCIPKEELLPRPPAGVRVEDTLLLAQLVNLERKFWSGSEGV

SEQ ID NO: 80095 - protein, 151 aa, Zea mays
  Coding DNA Sequence Number=SeqID_38316
MEDLLGRKGEFKQERVHPRQQRNLGMADMYTKHLAKENKGGRNLPQLNVMPVMNTSTRSNGLAQKSAVRNESKGAMRGRINKNTVRFESYPIDRWGLKGGNSVPTTSNVNYPDQRTDSEPLHDGSLTATYGWLLKRPSATYGWSLKTFSDP

SEQ ID NO: 80096 - protein, 68 aa, Zea mays
  Coding DNA Sequence Number=SeqID_38317
MSVAKAFSDDTYSDHPYGSLKVFSDQPYVAEGRFSNQPYHCFRKSRRIRAVHPMGVCPVKDVYRVIVK

SEQ ID NO: 80097 - protein, 93 aa, Zea mays
  Coding DNA Sequence Number=SeqID_38318
MDAQNDVTQEWLDRVKIARKGLRGTKRSSSRLSDAAKAYRLLAKLLHAKARALLLLVSRLPIVVLARRCRCTRAVVLLRRLRAKRRSHAERRC

SEQ ID NO: 80098 - protein, 170 aa, Zea mays
  Coding DNA Sequence Number=SeqID_38319
  Homolog annotation: Hit_ID=Q10DL9; Match level="QueryCoverage=43%, HitCoverage=25%, E-value=7e-19, Identity=83%"; Hit description =Dehydrogenase, putative, expressed
  Subcellular localization annotation: CTP_CleavageSite=51; ConfidenceScore=5.61e-01
MASFPPPFLLPQASGASALPPHVATPRNFLPMAPFFPSMPSIRHNGEGDVLLQHAVTPATSSTPVNADEGMISPVGVTSVVDVLCVTWGHVSEFQDSKSETDVDVDYNSMYSRQLDGEDGELSWFNAGVRVGVGIGLGVCGYRIGRRPTGSYIPKHQQELQAAAANGPHA

SEQ ID NO: 80099 - protein, 136 aa, Zea mays
  Coding DNA Sequence Number=SeqID_38320
MEFPFMIYVTYVSEFLDSKSETDVDVDYNSLYSKEDFLQGKKTGRDEKEVLKAIDYVHELSMSTRGQAVSLAARSRRFESSFNLARCFRIYNFLTMYDLLELNKVNFTYVRPYVVYLVNWVKLSLSGALVACLNEV

SEQ ID NO: 80100 - protein, 300 aa, Zea mays
  Coding DNA Sequence Number=SeqID_38321
  Homolog annotation: Hit_ID=Q6QP51; Match level="QueryCoverage=25%, HitCoverage=33%, E-value=7e-16, Identity=61%"; Hit description =Putative growth-regulating factor 1
MTASKRYATSFKFISLFLFPFLSLATGTGKGDTPKGILLREGSGPRALLLIRGSKAGPSEGFDSRLRALGLRAHYWSEVRRLAPRKGSTTASGHSGSAPTTDQGFVGWPPKGSTAASEHAERGMTLVYRKLQCRVLALTAIAAKSTQGPPYTDHSPTALAPFGEVQGVKPKFSHDSGFPKEDGGFIQAKSGDSFLSYHGTEAAPQCFCGGELAGDGQNGPLATNLPDRDNLNSESTMVNTVMWLTERAELWRKQATTGCGERLGASTGEEFPDCPARGVTLMRGNTFLPRSDVSRAKPEL

SEQ ID NO: 80101 - protein, 259 aa, Zea mays
  Coding DNA Sequence Number=SeqID_38322
MHNKNDLNSQSGLNSKFGFKRTKNKRKQKIKSKDKEKGESYRCLAFMGTGDPMGDPYPHGYGYGDAPHSCCASAVWDPLVSPIPIPSPFSQIQGAAPSAAISSRLGLNLNGFRPDFRSVAASSGDRAPLNVKLRLNLESLCRPRHQSAVSSSPRPATPPCSPSTYRTAQSSGFALETSLRGRKVLPRIRVTPRAGQSGNSSPVLAPNLSPHPVVACFRHSSARSVVSVGEISRQRAILAVAGKLAAAEALWRRLCAVIG

SEQ ID NO: 80102 - protein, 71 aa, Zea mays
  Coding DNA Sequence Number=SeqID_38323
MARCRGERIHGRRGCGRDNLGGGATVKLWTPTLESYKVVEINTFEQRKERIQAYNGSVAECYMSSGGELAP

SEQ ID NO: 80103 - protein, 81 aa, Zea mays
  Coding DNA Sequence Number=SeqID_38324
MNSRLPKRRHCPGLERLLETAHLELDGKLFVNTQQGPYLVRQLSAFRDRGVPRADERKERIQAYNGSVAECYVSSGGELAP

SEQ ID NO: 80104 - protein, 100 aa, Zea mays
  Coding DNA Sequence Number=SeqID_38325
MAELTEALARLGGDWSGLATVAEALAAMAGGKELAGAKEGCLAGGGFELGIKVNTLDLWLKIRRAGGGVGCDYVPASLGRQSGKLDLKNSSVSQVASSTE

SEQ ID NO: 80105 - protein, 79 aa, Zea mays
  Coding DNA Sequence Number=SeqID_38326
MAGGIELAGAKERWLAGEAFPLKGISSRDLGQSPPRVKRRIRRAGGGVGCDYVPASLGRQLGKLDLRNSSVSQVASSSE

SEQ ID NO: 80106 - protein, 256 aa, Zea mays
  Coding DNA Sequence Number=SeqID_38327
MELDATELAQEAARHGRDQARADASTGPPWGSSRTRPHDTRERAGRRGMDEGEAGASLAATASKAQSARARAAGGAVEQSIGQQRTERERKELEGKLRDGDKKVNVDPDDDSDWLHRNETFQSNDYVAMTHLLTPGSVHDSVGVIGEPGIDVREYRLEHLRLYNQTPKQKEAKIEYMIKHRALQADTLNVASIAMENPTYTPKVVHLTTDATEPDRSSSYRLRLGFPEFIRTPRKLPQGEEDRLGSGILSQTRAAA

SEQ ID NO: 80107 - protein, 143 aa, Zea mays
  Coding DNA Sequence Number=SeqID_38328
MTHLLTPGSVHDSVGVIGEPGIDVREYRLEHLRLYNQTPKQKEAKIEYMIKHRALQADTLNVASIAMEDPTYTPKVVHLTTDATEPDRSSSYRLRLGFPEFIRTPFLPAQTQTEDVGSFDMSSEAIRRKVPHGERQAILACRN

SEQ ID NO: 80108 - protein, 81 aa, Zea mays
  Coding DNA Sequence Number=SeqID_38329
METSPPFQEFGHCDVCRCTFNTFHRCDANILDVIVPRVRQTFDTREEAYLFYLDYAKLAGFSVRTKRCNCNCWCGMIATPH

SEQ ID NO: 80109 - protein, 72 aa, Zea mays
  Coding DNA Sequence Number=SeqID_38330
MDSMVVFEVAELDGVAMDANILDVFVPKVRQTFDTREEAYLFYLDYAKLAGFSVRTKRCNCNFWCGVIATPH

SEQ ID NO: 80110 - protein, 68 aa, Zea mays
  Coding DNA Sequence Number=SeqID_38331
MHLGAFSILNAPKDANILDVFVPRVRQTFDTREEAYLFYLDYAKLAGFSVRTKRYNCNCWCGVIATPH

SEQ ID NO: 80111 - protein, 52 aa, Zea mays
  Coding DNA Sequence Number=SeqID_38332
MDEYIRTNNDFRQRKEEDANILDVFVPRVRQTFDTREEAYLFFLDYAKVGWF

SEQ ID NO: 80112 - protein, 49 aa, Zea mays
  Coding DNA Sequence Number=SeqID_38333
MAHGMVRQIFDTREEAYLFYLDYAKLAGFSVRTKRCNCNCWCAVIATPR

SEQ ID NO: 80113 - protein, 110 aa, Zea mays
  Coding DNA Sequence Number=SeqID_38334
MESHNLSVGIRIVILILKLRGHGASLVCDPKSISMSTYSTSIVELLHGKAEKLSRDANILDVFVPRVRQTFDTREEAYLFYLDYAKLDGFSVRTKRCNCNCWCGVIATPH

SEQ ID NO: 80114 - protein, 79 aa, Zea mays
  Coding DNA Sequence Number=SeqID_38335
MDIGYDGAASNLITATAYLPSCMYDANILDVFVPRVRQTFDTREEAYLFYLDYAKLAGFSVRTKRCNCNCWCGVIVTPH

SEQ ID NO: 80115 - protein, 86 aa, Zea mays
  Coding DNA Sequence Number=SeqID_38336
MDEYLGPPVLSDALRFILLYFWAHLSRLSSLDANILDVFVRRVRQTFDTREEAYLFYLDYAKLAGFSVRTKRCNCNCWCGVIATPH

SEQ ID NO: 80116 - protein, 89 aa, Zea mays
  Coding DNA Sequence Number=SeqID_38337
MVSLGFELGIKVNTLDLWLKVVMRRMVMIMLMVMDANILDVFVPRVRQTFDTREEAYLFYLDYAKLAGFSVRTKRCNCNCWCGVIATPY

SEQ ID NO: 80117 - protein, 351 aa, Zea mays
  Coding DNA Sequence Number=SeqID_38338
  Gene Ontology: Mol. function=sugar binding
  Homolog annotation: Hit_ID=Q9LL87; Match level="QueryCoverage=84%, HitCoverage=98%, E-value=1e-146, Identity=88%"; Hit description=Beta- glucosidase aggregating factor
  Pfam annotation: Domain name=Dirigent; Domain location=3-152; Score =36.4; E_value=4.3e-09; Accession=PF03018.5; Description=Dirigent -like protein
  Pfam annotation: Domain name=Jacalin; Domain location=165-299; Score =111.9; E_value=1.9e-30; Accession=PF01419.7; Description=Jacalin -like lectin domain
  Pfam module annotation: Pfam domain module=Dirigent::Jacalin; Domain location=3-152::165-299
MASLQVTPTSAFTEWNELKFEGLYLFHTPLGSGANQARVIDNKAPIGIGATVVNNWTVYDGPGPNAKLVARAQGLHIQAGNWVNSFSLVFVDQRFSGSTLEVTGIVVESGEWAIVGGTGQFAMANGVIFKKFHEQRSEGNIIQLTIHAFCPRSAAKVGPWGGSGGSPVDITAEPQRLKSITVATGIAVTSIAFSYVDSAGQTQSAGRWGGSGGETEPVIQLGDSEVLTELSGTIGNVDGHTVITSIKFVTSLKTYGPFGAWGDGSDTPFAIPVQQGSAIVGFFARAGVYLDALGVYDANILDVFVSRVRQTFDTREEAYLFYLDYAKLAGFSVRTKRCNCNCWCGVIATPH

SEQ ID NO: 80118 - protein, 298 aa, Zea mays
  Coding DNA Sequence Number=SeqID_38339
  Homolog annotation: Hit_ID=Q6QP51; Match level="QueryCoverage=54%, HitCoverage=92%, E-value=5e-22, Identity=38%"; Hit description =Putative growth-regulating factor 1
MQAVCNCTKGMNLFNFDVSSMEAQAHTSCGRKQHSNRLQAHVPSWDSERALSHGMKTTRPCSVPQTARACTTAAPRTTRPVALTPRQGRRHLWQAKRATLHLRHDDRVKKGTEKGDTPKGILLREGSGPRALLLIRATSGHPGSAPTTDQGFEGWPPEGFDSRLRTCRARDDSGYVRYIAKARAMLPRSDRSHFAPPLADLTGKQRRLLLRLLCRLSRARTQPRPRTTDSASPNPQGSDSTSTSDDGLRLARPQGSDSTSTSDDGLRPRPTPGLELSLDLRGASASPDLGLGPTTPQG

SEQ ID NO: 80119 - protein, 331 aa, Zea mays
  Coding DNA Sequence Number=SeqID_38340
  Homolog annotation: Hit_ID=Q6QP51; Match level="QueryCoverage=48%, HitCoverage=92%, E-value=2e-23, Identity=45%"; Hit description =Putative growth-regulating factor 1
MQAVCNCTKGMNLFNFDVSSMEAQAHTSCGRKQHSNRLQAHVPSWDSERALSHGMKTTRPCSVPQTARACTTAAPRTTRPVALTPRQGRRHLWQAKRATLHLRHDDRVKKGTEKGDTPKGILLREGSGPRALLLIRATSGHPGSAPTTDQGFEGWPPEGFDSRLRTCRARDDSGYVRYIAKARAMLPRSDRSHFAPPLADLTGKTAPPAAPTAVPPVKGSDSTSTSNDGLRLAQPQGSDSTSTSDDGLRLARPQGSDSTSTSDDGLRLARPQGSNSASTSEEPPPRLTLGSDRPRRRGPPTEARRRQQGPDSSDSYAPTGLKRSSDGRDIT

SEQ ID NO: 80120 - protein, 273 aa, Zea mays
  Coding DNA Sequence Number=SeqID_38341
  Subcellular localization annotation: CTP_CleavageSite=51; ConfidenceScore=5.76e-01
MSSCSLMHRVFPPSKPPDGGFPSSFRFVVGGTQLRGSWYLSTIVRLQGFSSCSPVAPLRRRSPKTVTTSPWVGRSKPGCDLGPTLSFKDVHHPCWGGGRAEPELYLRVGSWVSLSLSVRGRERSLALREGGLRQCGAGRRRASSASACWVHRLGSRCPLLPEGGCRTVCTGGLPKMSRAARATFVFWGGSRLCTGMAPPRGGRCPTRPGGSEWGSAGGLAVHVVGAEVEAAREVPVADGITATIRASGLRLFVLVLAPRASAWARARLQQHPP

SEQ ID NO: 80121 - protein, 202 aa, Zea mays
  Coding DNA Sequence Number=SeqID_38342
  Subcellular localization annotation: CTP_CleavageSite=51; ConfidenceScore=5.76e-01
MSSCSLMHRVFPPSKPPDGGFPSSFRFVVGGTQLRGSWYLSTIVRLQGFSSCSPVAPLRRRSPKTVTTSPWVGRSKPGCDLGPTLSFKDVHHPCWGGGRAEPELYLRVGSWVSLSLSVRGRERSLALREGGLRQCGAGRRRASSASACWVHRLGSRCPLLPEGGCRTVCTGGLPKMSRAARATFVFWGGPAFAPVWRLRAEA

SEQ ID NO: 80122 - protein, 235 aa, Zea mays
  Coding DNA Sequence Number=SeqID_38343
  Homolog annotation: Hit_ID=Q6QP51; Match level="QueryCoverage=17%, HitCoverage=19%, E-value=8e-11, Identity=76%"; Hit description =Putative growth-regulating factor 1
MEAQAHASCNRRAECFVHATAPPLAPPPRLLDCGTNTATRGDPEHNPAAPAWRDDDAPVFRSSNGPRTRNGRPANHSPRRINSAAGQAAPLGPGKGDTPKRILPREGTRLRASLLIRGSKAGPSEGFNSRLRARGLYTHYWSEVRRPAPRKGSTAASGYSGSAPTTDQGFEGWPPKGSRPPQTRCRCFGSDRTPGVAPQGVFRSRTVSTTVAKWFVPIARGTVDTVYRFEPLRDA

SEQ ID NO: 80123 - protein, 213 aa, Zea mays
  Coding DNA Sequence Number=SeqID_38344
  Homolog annotation: Hit_ID=Q6QP51; Match level="QueryCoverage=19%, HitCoverage=19%, E-value=6e-11, Identity=76%"; Hit description =Putative growth-regulating factor 1
MAVAGGLEQRSRRQPSLRPIQERRENPLSRRVDDAPVFRSSNGPRTRNGRPANHSPRRINSAAGQAAPLGPGKGDTPKRILPREGTRLRASLLIRGSKAGPSEGFNSRLRARGLYTHYWSEVRRPAPRKGSTAASGYSGSAPTTDQGFEGWPPKGSRPPQTRCRCFGSDRTPGVAPQGVFRSRTVSTTVAKWFVPIARGTVDTVYRFEPLRDA

SEQ ID NO: 80124 - protein, 103 aa, Zea mays
  Coding DNA Sequence Number=SeqID_38345
MGKPVPSLLMLLLSRGGVPLDSPTRWQDVRPSHSSNHVLQRTCKNYATSKAEYTNTQLDLPVTALVPTITGMGDHVSGRVRGKVYCQVQSGFNNIMLREEKLS

SEQ ID NO: 80125 - protein, 84 aa, Zea mays
  Coding DNA Sequence Number=SeqID_38346
MGKPVPSLLMLLLSRGGVPLDSPTRWQDGRPSHSSNHVLQGTLTALVPTITGMGDHVSGRVRGKVYCQVQSGFNNIMLREEKLS

SEQ ID NO: 80126 - protein, 132 aa, Zea mays
  Coding DNA Sequence Number=SeqID_38347
MEEEKSTRAIEGLRQGQGAAGKWRERSKGAARLLADRSWRRKPRPEHRRARRGHGWGRGTAGDLERGMLEDGAEEAVQRRNAGRRERETGVEELRDDDDDDRRQPRPDKAPARFWIGRDVVRTNPNGVNNRI

SEQ ID NO: 80127 - protein, 187 aa, Zea mays
  Coding DNA Sequence Number=SeqID_38348
MEQGTRPGKGLGTGRGGWTQGEPWRWAPSSMDAGRREELTCWLGMEEEKSTRAIEGLRQGQGAAGKWRERSKGAARLLADRSWRRKPWPEHRRARRGHGWGRGTAGDLERSVLEDGAEEAVQKRNAGRRERETGVEELRDDDDDDRRQPRPDKAPARFWIGRDVVRTNLNGVNNRISDGVQFDLKDT

SEQ ID NO: 80128 - protein, 134 aa, Zea mays
  Coding DNA Sequence Number=SeqID_38349
  Subcellular localization annotation: CTP_CleavageSite=86; ConfidenceScore=5.28e-01
MARPASSRRARFRVPFLVEFPAPSLPSAGAPAPPSMAMPCCSSVLAAGDGAWSPNLPAPHRLSLPIFSSSTHRRVSCSPSSVGLAVAKYVRHAMCFGLWSLPIAHHPLFDLVVKLRLSLSSSVTLVRCAIEDFS

SEQ ID NO: 80129 - protein, 134 aa, Zea mays
  Coding DNA Sequence Number=SeqID_38350
  Subcellular localization annotation: CTP_CleavageSite=86; ConfidenceScore=5.31e-01
MARPASSRRARFRVPFLVEFPTPSLPSAGAPAPPSMAMPCCSSVLAAGDGAWSPNLPAPHRLSLPIFSSSTHRRVSCSPSSVGLAVAKYVRHAMCFGLWSLPIAHHPLFDLVVKLRLSLSSSVTLVRCAIEDFS

SEQ ID NO: 80130 - protein, 206 aa, Zea mays
  Coding DNA Sequence Number=SeqID_38351
MAYISLIHCIHLDCNLADGEYMLIPEQGVDGLFRFKCVVASKASLGHLSWNNSDGSATADDFTHPCQWRRHPFQFRLPCPRGFSLYLVEVLCSAGYPTPPLYTVQLYEEHRVPRCRVWLTLKAHPLQPGWRSLDSETIGFRADDTTKAAALKTLTTFCGYHPLEMVMHPLGLFPAEKRDDPMWCNRVSHVKDVWAMHPDHVRRITV

SEQ ID NO: 80131 - protein, 108 aa, Zea mays
  Coding DNA Sequence Number=SeqID_38352
MNSPHAHEDRPTPAISDADPYLDVTAVTSPTSLDSSPELARRWADDTTKAAALKTLTTFCGYHPLEMVMHPLGLFPAEKRDDPMWCNRVSHVKDVWAMHPDHVRRITV

SEQ ID NO: 80132 - protein, 113 aa, Zea mays
  Coding DNA Sequence Number=SeqID_38353
  Gene Ontology: Mol. function=translation elongation factor activity; Cellular component=mitochondrion; Biological process=translational elongation
  Homolog annotation: Hit_ID=Q9ZT91; Match level="QueryCoverage=50%, HitCoverage=12%, E-value=2e-18, Identity=75%"; Hit description =Elongation factor Tu, mitochondrial precursor
  Pfam annotation: Domain name=GTP_EFTU_D3; Domain location=26-104; Score=36.4; E_value=1e-07; Accession=PF03143.7; Description =Elongation factor Tu C-terminal domain
MEIRSLCAIKAVPTEGSIRTKHFNRKKTNKKFEAKIYVLTKDEGGRHTAFVTNYNPQFYFRTADVTRRVELLGEMKMVLPGDNGWDQDAHDQGAVGNSSFPTVLNCVVNSQHA

SEQ ID NO: 80133 - protein, 289 aa, Zea mays
  Coding DNA Sequence Number=SeqID_38354
  Gene Ontology: Mol. function=translation elongation factor activity; Cellular component=intracellular; Biological process=translational elongation
  Homolog annotation: Hit_ID=Q8W2C4; Match level="QueryCoverage=50%, HitCoverage=32%, E-value=3e-66, Identity=84%"; Hit description =Translational elongation factor Tu
  Pfam annotation: Domain name=GTP_EFTU_D2; Domain location=122-193; Score=87.0; E_value=5.8e-23; Accession=PF03144.15; Description =Elongation factor Tu domain 2
  Pfam annotation: Domain name=GTP_EFTU_D3; Domain location=198-276; Score=93.8; E_value=5.2e-25; Accession=PF03143.7; Description =Elongation factor Tu C-terminal domain
  Pfam module annotation: Pfam domain module=GTP_EFTU_D2::GTP_EFTU_D3; Domain location=122-193::198-276
MLMWVSTATFKACCCCHRCQLSHKRSAAARDLNSGGPIKQGWHWQASGQWTSATPSKVSMSGVGVTFGRSTCAGIEDLKRLAAHLLLGPAAVVVGGDWGLGLTDVDGPWCLVLVAAGRAGRGTVVTGRVEQGTIKTGEDVEILGLAQTGPLKTTVTGVEMFKKILDHGEAGDNVGLLLRGLKRGDVERGQVVCKPGSLKTCKKFEAEIYVLTKDEGGRHTAFVTNYSPQFYFRTADVTGRVELLGEMKMVLPGDNVTANFELISPVPLEPGNDYILNFFRQYRTIDQVF

SEQ ID NO: 80134 - protein, 605 aa, Zea mays
  Coding DNA Sequence Number=SeqID_38355
  Gene Ontology: Mol. function=cysteine-type peptidase activity; Biological process=proteolysis
  Homolog annotation: Hit_ID=Q109R5; Match level="QueryCoverage=87%, HitCoverage=48%, E-value=2e-50, Identity=26%"; Hit description=Ulp1 protease family, C-terminal catalytic domain containing protein
  Pfam annotation: Domain name=Peptidase_C48; Domain location=40-261; Score=50.2; E_value=6.9e-12; Accession=PF02902.9; Description=Ulp1 protease family, C-terminal catalytic domain
LSHDWLLLDYICTQGDLALIDFIKEIPCEPRVEVVLIDDAFVERKWMECLFQPSAYLGDEVIDCYINLIKAQKHLKCRSGGRVHIENAFQFNFLKRDGDLEIKTEELYPIKDMAHICSAERRVLLYLDHDMVFIPINIRETHWYLAVIHARNMEIQVLDSLGTSQDRKDLTDSIKGLQRQIDMISQRKELKDHRWPDLQVASWPLREIDMGYAKQTDSSSCGLFLLNYIEYWTGDELSDSFTQDDMSHFRKKMAAILLSSDLNKRRGCLLYKNEKEVDSGSSSDVEILENPTDSNKRKLLHVLDDSEVVYEDEEGPITQADLQRWFVDDWDKKAPVKVSTDGCTNDFLMVGLSTKDMPVTKADSIDVLCDYIMAIEDDTTLECFDMAVRLLANKESRRPKEEIINNRKHYMDMRFWRMVGFGKLPKYHQDPTTEELAKTLDCWPSMNYYITGCRYVLMPWKFNGCYALFVIDHVKKHVTFIDFTPTQDWCKHMPYKRFAEAIIMASKKYKIAYSKKRSGWAEDIFKWEHTIQTGVPIDLRGFNTSYLVLQAMAMWGNDRRLKFVGDAKTLRKNFVIDLLSYEDNSCRYAIPANIQQRLVDIAKKD

SEQ ID NO: 80135 - protein, 261 aa, Zea mays
  Coding DNA Sequence Number=SeqID_38356
  Homolog annotation: Hit_ID=Q10Q51; Match level="QueryCoverage=36%, HitCoverage=11%, E-value=2e-31, Identity=76%"; Hit description =RhoGAP domain containing protein, expressed
  Subcellular localization annotation: CTP_CleavageSite=77; ConfidenceScore=5.17e-01
MAGPGQDSCSTNTRYMPVCCHKVGKQVRAAYPQPGLASASHQAVAAPTSNVVPRLATDRVHCLLAGWAGILFCSETPAEAGSTWCLIPLFSPYGTRMITLIELVCHWLLPSTAGSVATSTPSLSSSALSQSWRRHKNRLPTASLRPVQPAATTTSSCSLSSPTRGVENLRDQLLKEGSLRASLESGLMNMRRGQVSFPSTIDTKTKADLEEVVAAEADIMNLKQKVSDLRGQLNNQVQLSSTSLCESCNNKRSINADKLVE

SEQ ID NO: 80136 - protein, 97 aa, Zea mays
  Coding DNA Sequence Number=SeqID_38357
MAERKREETRSSRAASVDARARPELHLDIREEAAKKNREPPTASNIRRHSSSLQVRAAYPQPGLASASHQAVAASTSNVVPRLATDRVHRLLASWAG

SEQ ID NO: 80137 - protein, 69 aa, Zea mays
  Coding DNA Sequence Number=SeqID_38358
MSGWKCFQKENTYDGESVKGLDGFNIGKDVPLTGYNFVLLLMVLSAGGLGLLISLSNSSILLIEDGHLS

SEQ ID NO: 80138 - protein, 77 aa, Zea mays
  Coding DNA Sequence Number=SeqID_38359
MVVSFCKVPYNALFILRMEVLKSGLGLGTGDVLPRLIKDWMGYNFVLLLMVLSAGGLGLLISLSNSSILLIEDGHLS

SEQ ID NO: 80139 - protein, 189 aa, Zea mays
  Coding DNA Sequence Number=SeqID_38360
MSTHPISLFPAKKEDDPMWKDRVGHAKDVWALYPGHTAHLTIRCMSALYRLQALQGEAMSQLMGLVESTKITLDNREDLVVDLSTELVEKDLQVEQMANHIQELEDQVEARENTIEVLEDQLQNTQQQLEEANQHLDLHHQAFEDMEAEGADEDVDIEGGEEPEPASSLDTAGSGRSPSPESSVASFAR

SEQ ID NO: 80140 - protein, 294 aa, Zea mays
  Coding DNA Sequence Number=SeqID_38361
MGMRVYETKIGIRIKVWYRVSSVERTKHMLRNMGAGYTTPPKYAVQLFEEHRVPRCRVRMTLEPHPLHPGWRSLDSESFGFRADDTIESTTLHVLTTFCGFHPLEMSTHPISLFPAKKEDDPMWKDRVGHAKDVWALYPGHTAHLTIRCMSALYRLQALQGEAMSQLMGLVESTKITLDNREDLVVDLSTELVEKDLQVEQMANHIQELEDQVEARENTIEVLEDQLQNTQQQLEEANQHLDLHHQAFEDMEAEGADEDVDIEGGEEPEPASSLDTAGSGRSPSPESSVASFAR

SEQ ID NO: 80141 - protein, 85 aa, Zea mays
  Coding DNA Sequence Number=SeqID_38362
  Subcellular localization annotation: CTP_CleavageSite=31; ConfidenceScore=5.36e-01
MGQILTRSTLTGSRAKSGDRGLASPAKQRARVAAGTPCAGQTPVVSGSGEVEPPSKAAPLGLLGLRWGRYCRCCSLHVLEPADAE

SEQ ID NO: 80142 - protein, 99 aa, Zea mays
  Coding DNA Sequence Number=SeqID_38363
MARVACTLCGKRLDGDVSVLSVGVNLICFPPYGDMLPCTRKTARKSTGPIGVPRHQLVPRHEESSSGSNDPIGDLEAQVEQLRTELCHRNRCGKKMVSV

SEQ ID NO: 80143 - protein, 83 aa, Zea mays
  Coding DNA Sequence Number=SeqID_38364
MGKPVPSHLMLLLSRVTALVPTITRMGDHVSGRVRRAICCQVHSGLRFLPKHNGLRLGMPLKCFSGYSKGFAGLVRGGFELQL

SEQ ID NO: 80144 - protein, 54 aa, Zea mays
  Coding DNA Sequence Number=SeqID_38365
MGKPVPSLLMLLLSRGLRFLPKHNGLRLGMPLKCFSGYSKGFAGLVRGGFELQL

SEQ ID NO: 80145 - protein, 127 aa, Zea mays
  Coding DNA Sequence Number=SeqID_38366
MDKGQPSPTIRTPPQRGMVVGGRENEEEIEVTEEKTPPPWESQAGNCFYFDICGSEPDSPTNKGKPRLADRGPFNWSHASSWHILESLLLCRVKERQPFVASALRWYQRKNARNEVREERILHLGLL

SEQ ID NO: 80146 - protein, 67 aa, Zea mays
  Coding DNA Sequence Number=SeqID_38367
MVKVDHMQTESINTLSGIKMLKHILESLLLCRVKERQPFVASALRWYQRKNARNEVREERILHLGLL

SEQ ID NO: 80147 - protein, 67 aa, Zea mays
  Coding DNA Sequence Number=SeqID_38368
MVKVDHMQTESINTYFDIKMLKHILESLLLCRVKERQPFVASVLRWYQRKNARNEVREQRILHLGLL

SEQ ID NO: 80148 - protein, 89 aa, Zea mays
  Coding DNA Sequence Number=SeqID_38369
MASTCKNIFSLGAWWDLTAKFPHILESLLLCRVKERQPFVASVLRWYQRKNARNEVREERILHLGLLCKNLSGGVFASLGICNNITLHS

SEQ ID NO: 80149 - protein, 249 aa, Zea mays
  Coding DNA Sequence Number=SeqID_38370
MHILESLLLCRVKERQPFVASVLRWYQRKNARNKVREERILHLGLWCKNLSGGVLPPLLCNRSAFLYFPMFCNVCKTDETFLERKRRSEDAEKRNRQLHVDLTTAQARVAALESHEAIAVEALKQAKDEHVQKLMEAYLVTHNQRRALRIQEPASSNPVQPMRAEDPQILEGHSVSIKGEKKAWELLEGAIVFEGIPVFPQAMDKQEHPESSQDPPPELFEPHTMKKILAPSREIKEEAASTPPAPPPL

SEQ ID NO: 80150 - protein, 511 aa, Zea mays
  Coding DNA Sequence Number=SeqID_38371
  Gene Ontology: Mol. function=hydrogen ion transporting ATP synthase activity, rotational mechanism; Cellular component=proton -transporting two-sector ATPase complex; Biological process=ATP synthesis coupled proton transport
  Homolog annotation: Hit_ID=Q2QYW3; Match level="QueryCoverage=78%, HitCoverage=88%, E-value=0.0, Identity=82%"; Hit description =Expressed protein
  Pfam annotation: Domain name=DUF231; Domain location=315-488; Score =199.5; E_value=8.1e-57; Accession=PF03005.6; Description=Arabidopsis proteins of unknown function
  Subcellular localization annotation: CTP_CleavageSite=84; ConfidenceScore=5.09e-01
EFDYGDPRTDTPDPTDANNTAFVAAGSGWASAAMAKPPPPTSTSDPALPTTATTTSSAPKSSSRPSPRPRGLLDPLAASARSLLASARRSPVTTLAAAFFLLALVMYGEDARTIAELSIDDYLYPDADLYNVSGLPPLALPPLTCDLSSGRWVFDNVSVPAYREKDCTFLTKQVSCLANGRPDDMWQYWRWQPNECSLPTFDARRFMEAMRGKRLMFVGDSLNRNQWESLVCLVQSILSKGRKKIVKRGSFNTFYAKEYRATLEFYWAPFLVESNSDNPNFHSIKERIISPERIEAHAKHWKDADYLVFNTYIWWMNNADIKVRRPNSRYWSDNDEVPRIEAYGRVFKTWSDWLNDNIDPARTSIFFMTISPPHLSPQNWGNPDGIKCVRETLPYQNYSQHLDLYHDMRLYDLVVNVASSMEKVPVTVINITRMSDYRKDAHTSLYTIRQGKLLTPKQKADPEKFADCIHWCLPGVPDVWNQILYTRILSKSSWHSNFSPPPSQSLPLPPQ

SEQ ID NO: 80151 - protein, 67 aa, Zea mays
  Coding DNA Sequence Number=SeqID_38372
MHDLLLVLGLLGHSGWLLGQEDELPGCSDNTTAAIAKETASGTGAGADADAGADADASAGAGAGGLA

SEQ ID NO: 80152 - protein, 209 aa, Zea mays
  Coding DNA Sequence Number=SeqID_38373
  Gene Ontology: Mol. function=GTPase activator activity; Cellular component=cytoplasm; Biological process=regulation of GTPase activity
  Homolog annotation: Hit_ID=Q6ZD39; Match level="QueryCoverage=75%, HitCoverage=22%, E-value=3e-68, Identity=74%"; Hit description =Putative ARF GTPase-activating domain-containing protein
  Pfam annotation: Domain name=ArfGap; Domain location=57-190; Score =146.6; E_value=6.7e-41; Accession=PF01412.9; Description=Putative GTPase activating protein for Arf
MGRKGRKCLVVGRGDLCMSPVEFEPSVSDDLVLEQKSGNGQHDVRGTHHHRTRMKPEKPIDLLRKVDGNNMCADCGASEPDWASLNLGALLCIECSGVHRNLGVHISMVRSLTHDVRVWEPSVINLFQSLGNMFVNSIWEETLPDDNSSADGSDTSQYLSISKPKHKDVFSAKEKFIHAKVFTTFTTAYIPLFFSNVWGVKNQIISSEE

SEQ ID NO: 80153 - protein, 169 aa, Zea mays
  Coding DNA Sequence Number=SeqID_38374
  Gene Ontology: Mol. function=GTPase activator activity; Cellular component=cytoplasm; Biological process=regulation of GTPase activity
  Homolog annotation: Hit_ID=Q6ZD39; Match level="QueryCoverage=87%, HitCoverage=20%, E-value=8e-64, Identity=74%"; Hit description =Putative ARF GTPase-activating domain-containing protein
  Pfam annotation: Domain name=ArfGap; Domain location=46-167; Score =140.4; E_value=4.7e-39; Accession=PF01412.9; Description=Putative GTPase activating protein for Arf
MDSHLRYFKQGYELLHQMEPYINQKSGNGQHDVRGTHHHRTRMKPEKPIDLLRKVDGNNMCADCGASEPDWASLNLGALLCIECSGVHRNLGVHISMVRSLTHDVRVWEPSVINLFQSLGNMFVNSIWEETLPDDNSSADGSDTSQYLSISKPKHKDVFSAKEKFIHAK

SEQ ID NO: 80154 - protein, 243 aa, Zea mays
  Coding DNA Sequence Number=SeqID_38375
TREKEKGGAAYRWRERSGEGRDWLREVLTVTTVYGLTAGVLGSSSCKLHGLSGKLSEGLDRAEEGGKGVGHGGCPRAALAGRGEVAGAMGELGGVRRGTEEATGKAAGHWDGLYSRGAGVVTGGHGRTGPWVDTLSNTWGVTAPVDTEARGHVHRRCGPGVAPVDAEARGRVCRRCGCGRLGRWSRGGGRGGEGAECRDGGREEAQRRDGGREEVATAGLVRVGRSGCRVVGYGGVGAATVFG

SEQ ID NO: 80155 - protein, 317 aa, Zea mays
  Coding DNA Sequence Number=SeqID_38376
  Subcellular localization annotation: CTP_CleavageSite=45; ConfidenceScore=5.03e-01
MQGHSVPTHINRPHRFPGNRSGLTALAYNASLTPTAVVQLWCWIRGYLLSSFLLRHEDVLSVSEVTVYRNAMNITREKEKGGAAYRWRERSGEGRDWLREVLTVTTVYGLTAGVLGSSSCKLHGLSGKLSEGLDRAEEGGKGVGHGGCPRAALAGRGEVAGAMGELGGVRRGTEEATGKAAGHWDGLYSRGAGVVTGGHGRTGPWVDTLSNTWGVTAPVDTEARGHVHRRCGPGVAPVDAEARGRVCRRCGCGRLGRWSRGGGRGGEGAECRDGGREEAQRRDGGREEVATAGLVRVGRSGCRVVGYGGVGAATVFG

SEQ ID NO: 80156 - protein, 71 aa, Zea mays
  Coding DNA Sequence Number=SeqID_38377
MEGRGMSIIKDGAKAMIVTDKGENAAKVQDKHHDKDQEMTRVKVITDKHNQGCILDKTCEASKKGKQSMVK

SEQ ID NO: 80157 - protein, 71 aa, Zea mays
  Coding DNA Sequence Number=SeqID_38378
MEGRGMSIIKDGAKAMIVTDKGENATKVQDKHHGKDQGMTRVKVITDKHNQGCILDKTCEASKKGKQSMVK

SEQ ID NO: 80158 - protein, 95 aa, Zea mays
  Coding DNA Sequence Number=SeqID_38379
MDIVVEEGNVDVGNTAEPSYEVVARSGCSAQLSTKDTNEHELAIEREDSKVSVGNAAKQSHDVVGVGIDCIFNHAKVSTEADLGPQPGRLSYLHS

SEQ ID NO: 80159 - protein, 486 aa, Zea mays
  Coding DNA Sequence Number=SeqID_38380
  Gene Ontology: Mol. function=cysteine-type peptidase activity; Biological process=proteolysis
  Homolog annotation: Hit_ID=Q109R5; Match level="QueryCoverage=77%, HitCoverage=41%, E-value=5e-43, Identity=29%"; Hit description=Ulp1 protease family, C-terminal catalytic domain containing protein
MDIVVEEGNVDVGNTAEPSYEVVARSGCSAQLSTKDTDEHELAIESEDSKVSVGNAAKQSHDVVGVGIDCIFNHAKVSTEANLGPQPDVIHLTSLDVPNESSQISSDADMVEQNKQDALDTLIRISQHKKPKKLNVARVVSEDYKCTPEDVQLIEYIKTLPGKQVVVDIDSAWLNRNDMECLFHGDIQLSGEALSAYIHCIRDEEHLLHREGGKVFLENTFISSLLKRDGDPKVLLNCVHSNEYRKFSLVPRSSECKKSELKGLERQIKLAAEHKELYQGKWSNLDVASWPVIEKITTQMQTDGVSCGLWMINYMEYWTGSSLSDNVTQDDITMFRFKLPAILWDSRLNTKKGHQNLDHNVDEDGESSSDVQIIDTPLTSTNTQELMFVLCTYIMGIDNAKYLKKHWIQSTKPYPISLSLQKLKDILDVNKPMDTDCFNMAVRMIACNDALFLLEDKYHYMDLQFCILLPFSFMGSLHLICTLHGH

SEQ ID NO: 80160 - protein, 221 aa, Zea mays
  Coding DNA Sequence Number=SeqID_38381
MEILKLKLGLGTGDVLPRDPQLSIIDSDRHTFAVMKTWSLFYNVRKRQIFVAFAPRWYQMKKNNTEVREDLVLHIGSFAYNLSGGVCASLGLYNITTLHSLLVLDQLADRDLALDWAVQSRLLACAKEARAQARIKELSSTVDNLQVYCNTLHEEVHILYSQLHPSVPAHPAEAEAGPSHVAGRALGGELDLFEPPPSLRLVDVWTPTPDDEATKSNGKQE

SEQ ID NO: 80161 - protein, 94 aa, Zea mays
  Coding DNA Sequence Number=SeqID_38382
MDPQLSIIDSDRRTFAVMKTWSLFYNHTLESLFLSRVRKRQIFVAFAPRWYQMKKNKTEVREDLVLHIGSFVYSLSGGVCASLGLYNITTLHSL

SEQ ID NO: 80162 - protein, 91 aa, Zea mays
  Coding DNA Sequence Number=SeqID_38383
MSVMGSTSEKMYLCQDRVDVGLLTEDPLTGHMPRHGSSAEYNRFGSPYLRGYGDLNTSMFIYRHNDDTIYVDDIVLTASSAALLQHTIVSL

SEQ ID NO: 80163 - protein, 123 aa, Zea mays
  Coding DNA Sequence Number=SeqID_38384
MDPQLSIIDSDRRTFAVMKTWSLPYNLSQDVNTMDKNDVHTLESLFLSRIPEYVGNHPTASVASASHPQASWPQPPPPPPQQPAYSRGQQPEESQQTHQQRDFRKESEARTVNSTVPESKHIY

SEQ ID NO: 80164 - protein, 169 aa, Zea mays
  Coding DNA Sequence Number=SeqID_38385
  Pfam annotation: Domain name=UBA; Domain location=54-93; Score=17.4; E_value=0.031; Accession=PF00627.21; Description=UBATS-N domain
MAATCAEMAAAAEEERLEVAAGTGTGCTRGERKASSARRRSLLKPFGTSRISSFDLFSYIHLESMEFDRAHDIQAFFASDRNKELATNYLLEHAGSTAYYITCITLSLVEQWATEKKSMESCKLIFTREKQYAKEYDTQGWDRDAHDQCAIGNSSFPTVLNCVVNSQHA

SEQ ID NO: 80165 - protein, 279 aa, Zea mays
  Coding DNA Sequence Number=SeqID_38386
  Gene Ontology: Mol. function=methyltransferase activity; Biological process=metabolic process
  Homolog annotation: Hit_ID=Q1SW51; Match level="QueryCoverage=47%, HitCoverage=39%, E-value=6e-17, Identity=33%"; Hit description =Generic methyltransferase
  Pfam annotation: Domain name=Methyltransf_11; Domain location=201 -278; Score=-2.8; E_value=0.1; Accession=PF08241.2; Description =Methyltransferase domain
  Subcellular localization annotation: CTP_CleavageSite=37; ConfidenceScore=5.29e-01
MSSELLSLLSTNLLALLAFLSPRVHPVPVPAATSNLSSSAAAAISAQVAAIAHELDATRLVPHCVSAGDGTGTTLPSELLLFLSPHALPLGRDARMGHTHMPTSVAHACFRSPSTLALLAAFATYAPHAACPRDATLAHRLVSKACEPLPRRRYLSQGPRAALSASNMGVDGRRWVRSRHDHEFLVDDVLRLAAGKIRTGLDVSGGAANFAARMRERGVTIFTTVLDNAGKPMNEFVAARGLFPLLLSPAHRFPFYDGVFDLVHVGATALAEGGSSVLG

SEQ ID NO: 80166 - protein, 159 aa, Zea mays
  Coding DNA Sequence Number=SeqID_38387
  Gene Ontology: Mol. function=receptor activity; Cellular component =mitochondrial outer membrane translocase complex; Biological process= protein import into mitochondrial outer membrane
  Homolog annotation: Hit_ID=Q8RZI8; Match level="QueryCoverage=71%, HitCoverage=40%, E-value=5e-35, Identity=78%"; Hit description =Putative mitochondrial import receptor subunit TOM20
  Pfam annotation: Domain name=TOM20_plant; Domain location=9-96; Score= -46.0; E_value=1e-08; Accession=PF06552.3; Description=Plant specific mitochondrial import recep
MEMGGMSDAERLFFFEMACKNSEVAYEQNPNDADNLTRWGGALLELSQVRTGPDSLKLLEVICEMQIFIFHECLLRSAMRKPNWRRHFKLIPTSPMHSGAWEMLRPLMDSSLQTMHSGGTKECSTLFEKVFPFVPAFLGHGTWLCTMFLYFHDLILECW

SEQ ID NO: 80167 - protein, 121 aa, Zea mays
  Coding DNA Sequence Number=SeqID_38388
  Pfam annotation: Domain name=DUF581; Domain location=85-121; Score =17.7; E_value=0.00012; Accession=PF04570.5; Description=Protein of unknown function (DUF581)
MELDECEETMPYDVNIEEEMQRRQQQHQEAYDEDDDVPGGAFSLMAGLSVLLENHSKSYTGKAAAAQIISKATLVTTTHGPNHHQQQRKIPVSAAAAGSFLQRCCLCHKELAEGMDIYMYK

SEQ ID NO: 80168 - protein, 214 aa, Zea mays
  Coding DNA Sequence Number=SeqID_38389
  Gene Ontology: Mol. function=heat shock protein binding; Biological process=protein folding
  Homolog annotation: Hit_ID=Q0PMD7; Match level="QueryCoverage=45%, HitCoverage=23%, E-value=8e-35, Identity=72%"; Hit description=J -domain protein
  Pfam annotation: Domain name=TOM20_plant; Domain location=3-110; Score=-18.5; E_value=6.5e-11; Accession=PF06552.3; Description=Plant specific mitochondrial import recep
MRRSESRAHQKIDSRHGPDVEAKLEEALQINPNKSDALWCLGNAQTSHGFFTPDNAIANEFFTKATGCFQKAVDVADQLSQNSRISMTSFLNDDSFKAINDEGMPMYQRPFMKGKLYIHFSVEFPDSLSPEQCKALEAVLPPKPVSQYIDMELDECEETMPYDVNIEEEMQRRQQQHQEAYDEDDDVPGGWAEGAVRPAVGSLWQICCFALGDY

SEQ ID NO: 80169 - protein, 128 aa, Zea mays
  Coding DNA Sequence Number=SeqID_38390
  Gene Ontology: Mol. function=heat shock protein binding; Cellular component=membrane; Biological process=protein folding
  Homolog annotation: Hit_ID=Q0PMD7; Match level="QueryCoverage=75%, HitCoverage=23%, E-value=3e-35, Identity=72%"; Hit description=J -domain protein
MTSFLNDDSFKAINDEGMPMYQRPFMKGKLYIHFSVEFPDSLSPEQCKALEAVLPPKPVSQYIDMELDECEETMPYDVNIEEEMQRRQQQHQEAYDEDDDVPGGWAEGAVRPAVGSLWQICCFALGDY

SEQ ID NO: 80170 - protein, 225 aa, Zea mays
  Coding DNA Sequence Number=SeqID_38391
  Gene Ontology: Mol. function=heat shock protein binding; Biological process=protein folding
  Homolog annotation: Hit_ID=Q0PMD7; Match level="QueryCoverage=42%, HitCoverage=23%, E-value=9e-35, Identity=72%"; Hit description=J -domain protein
  Pfam annotation: Domain name=TOM20_plant; Domain location=7-121; Score=-26.2; E_value=2.7e-10; Accession=PF06552.3; Description=Plant specific mitochondrial import recep
MVAGNSFLRSRQRESLEVKSSHIGLHYAANVEAKLEEALQINPNKSDALWCLGNAQTSHGFFTPDNAIANEFFTKATGCFQKAVDVADQLSQNSRISMTSFLNDDSFKAINDEGMPMYQRPFMKGKLYIHFSVEFPDSLSPEQCKALEAVLPPKPVSQYIDMELDECEETMPYDVNIEEEMQRRQQQHQEAYDEDDDVPGGWAEGAVRPAVGSLWQICCFALGDY

SEQ ID NO: 80171 - protein, 44 aa, Zea mays
  Coding DNA Sequence Number=SeqID_38392
MVAAGRSCAGVVGTWASLLEWSSARGTAPCACTREGAVGNNKAN

SEQ ID NO: 80172 - protein, 231 aa, Zea mays
  Coding DNA Sequence Number=SeqID_38393
MAARVFSPRVSTASRMGLRKNSKPPAGIDGVLSTAQHKAASRAETSGLLQEIDDAWLAAHFVEHIASTDGALRSSTQTGRKPGREPWRGCSRASAAARHGRGLRQRGEEGRAAAVESLLLEFLGTMGGRGGRAAARRGAGRTASSARQQGERARGEGLELGCRPWKLKGAPWETREAAAAALEGERRRAPWWPRGGAAQGPSGPGRPCWNGARPGELLPAPAPGKERWGGR

SEQ ID NO: 80173 - protein, 326 aa, Zea mays
  Coding DNA Sequence Number=SeqID_38394
  Homolog annotation: Hit_ID=Q75LB9; Match level="QueryCoverage=42%, HitCoverage=39%, E-value=2e-56, Identity=72%"; Hit description =Putative pirin-like protein
  Pfam annotation: Domain name=Pirin_C; Domain location=25-127; Score =136.7; E_value=6.3e-38; Accession=PF05726.3; Description=Pirin C -terminal region
MEARVIAGEALGVASPVYTLTPTMYVDFTMRPGSRLHQSVLEGWNAFIYVIDGDGVFGRATATAHYCLVLGPGDGVSVWNRSTRPLRFVLVAGQPLGVPVVQHRPFVMNSRAEIQKAMEDYYYGKNGFERAGQWSSSAGSARREADGDQSSNFSIYLSCSPKWTDGSIPLDVLSDKLTKISKIAASQTKIYMVLQLVNGGKLFDGITHNVTKELMKYHSQTLGYVIGGNNMRSDANHLTEGINILIATLDRLLDHLQNTGSFKYKELKSTKKVSRRYPKIEKSQATRKRRRAFFKIKIMSALPFLMDASRDYTKMIFRGFREPCFH

SEQ ID NO: 80174 - protein, 300 aa, Zea mays
  Coding DNA Sequence Number=SeqID_38395
  Homolog annotation: Hit_ID=Q75LB9; Match level="QueryCoverage=45%, HitCoverage=39%, E-value=1e-56, Identity=72%"; Hit description =Putative pirin-like protein
  Pfam annotation: Domain name=Pirin_C; Domain location=25-127; Score =136.7; E_value=6.3e-38; Accession=PF05726.3; Description=Pirin C -terminal region
MEARVIAGEALGVASPVYTLTPTMYVDFTMRPGSRLHQSVLEGWNAFIYVIDGDGVFGRATATAHYCLVLGPGDGVSVWNRSTRPLRFVLVAGQPLGVPVVQHRPFVMNSRAEIQKAMEDYYYGKNGFERAGQWSSSAGSARREADGDQSSNFSIYLSCSPKWTDGSIPLDVLSDKLTKISKIAASQTKIYMVLQLVNGGKLFDGITHNVTKELMKYHSQTLGYVIGGNNMRSDANHLTEGINILIATLDRLLDHLQNTGSFKYKELKSVKTTRIYDEEFADLGWGRGENEIEDVFIVVL

SEQ ID NO: 80175 - protein, 558 aa, Zea mays
  Coding DNA Sequence Number=SeqID_38396
  Gene Ontology: Mol. function=protein serine/threonine kinase activity; Biological process=protein amino acid phosphorylation
  Homolog annotation: Hit_ID=Q9SWU7; Match level="QueryCoverage=82%, HitCoverage=94%, E-value=0.0, Identity=74%"; Hit description =Receptor-like kinase
  Pfam annotation: Domain name=Pkinase; Domain location=387-558; Score =25.9; E_value=4.2e-10; Accession=PF00069.15; Description=Protein kinase domain
  Pfam annotation: Domain name=Pkinase_Tyr; Domain location=388-558; Score=2.1; E_value=1.3e-12; Accession=PF07714.7; Description=Protein tyrosine kinase
  Pfam module annotation: Pfam domain module=Pkinase::Pkinase_Tyr; Domain location=387-558::388-558
MKAATDRRGREVLDRANGGRRRAGMARGEGSRAGMAMAGSDLPSLEQPRGDGERERTFHDGGRERRAGAGIVGSEFPSLEQPRGDNDGEVGPSMMAAERALVSDVEGRHHRHVCPHFSCGGLSNISYPFRRQGDPSGCGVQSYELVCTDTDATIRIGSGTYKVLSINSTYSYFWVIDADLDIQSSCPLPRWDYHARWINLYLHLWRIEFIYQYFYPSSFYIDSGRWAIFVNCSQPIENIDTDKYHIYEPVSCLSNSSFIYLLVTHYWDADNWDVTAGVLEPSCGYLAMTPLGGPGMQVPWNTSYPDVVKFMRSGFALGFPVWYGDNIRECLANNMRFILMPLAVFVFLAYKYWKTRITIDAVEKFLRMHHMLVPMRYAYTNIIAITGHFRDKLGQGGYGTVYKGVLQPGEVHVAVKMLGNSNCNGEEFISEVATIGKIHHVNVVRLIGFCSEENIRALIYEFMPRGSLDKYIFSSEKTFSWDKLNEIALGIARGLNYLHHGCDMQIVHFDIKPHNILLDSNFVPKVADFGLAKLFPRDDSFVPLSAMRGTIGYIAPEM

SEQ ID NO: 80176 - protein, 674 aa, Zea mays
  Coding DNA Sequence Number=SeqID_38397
  Gene Ontology: Mol. function=protein serine/threonine kinase activity; Cellular component=integral to membrane; Biological process=protein amino acid phosphorylation
  Homolog annotation: Hit_ID=Q9SWU7; Match level="QueryCoverage=68%, HitCoverage=95%, E-value=0.0, Identity=74%"; Hit description =Receptor-like kinase
  Pfam annotation: Domain name=Pkinase; Domain location=387-655; Score =170.8; E_value=3.5e-48; Accession=PF00069.15; Description=Protein kinase domain
  Pfam annotation: Domain name=Pkinase_Tyr; Domain location=388-655; Score=125.4; E_value=1.6e-34; Accession=PF07714.7; Description =Protein tyrosine kinase
  Pfam module annotation: Pfam domain module=Pkinase::Pkinase_Tyr; Domain location=387-655::388-655
MKAATDRRGREVLDRANGGRRRAGMARGEGSRAGMAMAGSDLPSLEQPRGDGERERTFHDGGRERRAGAGIVGSEFPSLEQPRGDNDGEVGPSMMAAERALVSDVEGRHHRHVCPHFSCGGLSNISYPFRRQGDPSGCGVQSYELVCTDTDATIRIGSGTYKVLSINSTYSYFWVIDADLDIQSSCPLPRWDYHARWINLYLHLWRIEFIYQYFYPSSFYIDSGRWAIFVNCSQPIENIDTDKYHIYEPVSCLSNSSFIYLLVTHYWDADNWDVTAGVLEPSCGYLAMTPLGGPGMQVPWNTSYPDVVKFMRSGFALGFPVWYGDNIRECLANNMRFILMPLAVFVFLAYKYWKTRITIDAVEKFLRMHHMLVPMRYAYTNIIAITGHFRDKLGQGGYGTVYKGVLQPGEVHVAVKMLGNSNCNGEEFISEVATIGKIHHVNVVRLIGFCSEENIRALIYEFMPRGSLDKYIFSSEKTFSWDKLNEIALGIARGLNYLHHGCDMQIVHFDIKPHNILLDSNFVPKVADFGLAKLFPRDDSFVPLSAMRGTIGYIAPEMVSRSFGVISSKSDVYSFGMLLLEMTGGRRNADPHAGSSSQAYYPSLVYRQLSQGDANRISEGVDMHELEKKLCIIGLWCIQMKPQDRPTMSEVIEMLEAGVDGIQMPPRPYFCDEE

SEQ ID NO: 80177 - protein, 107 aa, Zea mays
  Coding DNA Sequence Number=SeqID_38398
MGIYLAAAEVGPGKGTERYCPWRKGPRRHDYLPEQRRRSVMGAPSQRKAKNAEGDGEKGRRGARPGKAGEERPAGWVSGTMARSRALACVEPAAGKWQRRKRRDVGG

SEQ ID NO: 80178 - protein, 145 aa, Zea mays
  Coding DNA Sequence Number=SeqID_38399
MGIYLAEAEVSLGKGTERYCPWRKGPRRHDYLPEQRRRSVMGAPSQRKAEADQGDSGSPARAGGRSDHGQRPREQREEKNGAAAWREQNAEGDGEKGRRGARPGKAGEERPAGWVPGAMARSRALACVEPAAGKWQRRKRRDVGG

SEQ ID NO: 80179 - protein, 384 aa, Zea mays
  Coding DNA Sequence Number=SeqID_38400
  Subcellular localization annotation: CTP_CleavageSite=55; ConfidenceScore=5.32e-01
MPRSSCIHRALPPSGPPDGVRQCSLERSASGSSPPAISPPESSRSWWCCRSCLLLAAVRGAQPCGGWRTSAIARLQGFSSCSLASTSGRWSSARMTTSLVVERSESGCGLPPALSFKDVHHPRWGGRRAELGSCPPHGLATRFFLQHSGEKGIHQPCGGGELRLRGAGQLRRHQLPRVWLLGLDGFGAASDAVSCCLVGAWLSVHCTGDGRVVRRSDTSMASPAPPAAPGGHTRHRTPQGWRPRSWMVLSPSRSEDGSENLFACAGAAAIRRYGTGAEVAAVVDAEAVAAAGEAAHCRGGCLHWRDRQRHLPSDLRIFGFNGLVVAPHRKTGVRTFSQWRTSGGNRHCWRVVGADVAVAVGADVVASAGEPLGASYPVTLLVWR

SEQ ID NO: 80180 - protein, 384 aa, Zea mays
  Coding DNA Sequence Number=SeqID_38401
  Subcellular localization annotation: CTP_CleavageSite=55; ConfidenceScore=5.32e-01
MPRSSCIHRALPPSGPPDGVRQCSLERSASGSSPPAISPPESSRSWWCCRSCLLLAAVRGAQPCGGWRTSAIARLQGFSSCSLASTSGRWSSARMTTSLVVERSESGCGLPPALSFKDVHHPRWGGRRAELGSCPPHGLATRFFLQHSGEKGIHQPCGGGELRLRGAGQLRRHQLPRVWLLGLDGFGAASDAVSCCLVGAWLSVHCTGDGRVVRRSDTSMASPAPPAAPGGHTRHRTPQGWRPRSWMVLSPSRSEDGSENLFACAGAAAIRRYGTGAEVAAVVDAEAVAAAGEAAHCRGGCLHWRDRQRHLPSDLRIFGFNGLVVAPHRKTGVRTFSQWRTSGGNRHCWRVVGAEVAVAVGADVVASAGEPLGASYPVTLLVWR

SEQ ID NO: 80181 - protein, 98 aa, Zea mays
  Coding DNA Sequence Number=SeqID_38402
MAKTQRQAAKEGDVRTKTCFVPRQRLPKFDLHLQVTATKKGGRCSGDAGAQPPGMYGIDLGTIVGLELDVDIVAANTTTKKVNAASVSFFRTLSCPKK

SEQ ID NO: 80182 - protein, 62 aa, Zea mays
  Coding DNA Sequence Number=SeqID_38403
TALCQDKRLPKFDLHLQVAATKKGGRCSGDAGAQPPGAAILPTTFHSCRAQPLGVAVQTTTK

SEQ ID NO: 80183 - protein, 140 aa, Zea mays
  Coding DNA Sequence Number=SeqID_38404
MTIWIGIKLTVLRGCNCRLRMMSELRSFSLHVYCYWKLVNNLSKLLPLFLTKSIGVLLPKSAIKFERYLMDEILSIDADVSEVELGRRPALCQDKGCQSLTCISRSQRQRKVGDAVATREHNHQLLAYISTNGRVSGRQS

SEQ ID NO: 80184 - protein, 67 aa, Zea mays
  Coding DNA Sequence Number=SeqID_38405
NLSKLLPLFLTKSIGVLLPKSAIKFERYLMDEDDMTGDEIQSSPKGATLYDSHYGWWSWASFSPRCT

SEQ ID NO: 80185 - protein, 294 aa, Zea mays
  Coding DNA Sequence Number=SeqID_38406
  Subcellular localization annotation: CTP_CleavageSite=54; ConfidenceScore=5.75e-01
MAASMTSPDFLAVGAVLGKPTMLVGSGREDLPSPSRSLASPPSASRSTTFSLARASSALAPVTITDISLAADDKTDELFAKISLRLGPPYCLLQFPSLLVSTILPSSVSFTLGVLDSRLGGTHCDRFDPSSSAAVHSLHGSIARLERETLVPVFLFIPHFSEFSSPSPSIESKEAEPAEKGRFDFPVGCLGSRRDAANLSKLLPLFLTLAVYKWSLDSLVAKKFVSVLLPKSTIKFERYLMDEILSIDADVSEVEFGKKDGMTGDEIQSSPKGVTLYDGHCGWWSWASFSPRRT

SEQ ID NO: 80186 - protein, 105 aa, Zea mays
  Coding DNA Sequence Number=SeqID_38407
MDESGVKKEIGLLGLVIVSHLSPRGSGALQPITRDAARGCHFHDALDTLLRQALDRRTWSIEYRCVVFQHSRGVYSDRWEATCFGAPSGEQSLGCEGLLRALFHL

SEQ ID NO: 80187 - protein, 237 aa, Zea mays
  Coding DNA Sequence Number=SeqID_38408
  Gene Ontology: Mol. function=oxidoreductase activity, acting on single donors with incorporation of molecular oxygen, incorporation of two atoms of oxygen; Cellular component=plasma membrane; Biological process=...
  Gene Ontology: Biological process=methionine biosynthetic process
  Homolog annotation: Hit_ID=Q7XEJ5; Match level="QueryCoverage=64%, HitCoverage=83%, E-value=8e-74, Identity=83%"; Hit description=1, 2 -dihydroxy-3-keto-5-methylthiopentene dioxygenase 4
  Pfam annotation: Domain name=ARD; Domain location=58-196; Score =200.8; E_value=3.2e-57; Accession=PF03079.5; Description=ARDARD' family
  Pfam annotation: Domain name=AraC_binding; Domain location=110-229; Score=-5.6; E_value=0.1; Accession=PF02311.9; Description=AraC-like ligand binding domain
  Pfam annotation: Domain name=Cupin_2; Domain location=116-190; Score =38.4; E_value=2.5e-08; Accession=PF07883.2; Description=Cupin domain
  Pfam module annotation: Pfam domain module=ARD::AraC_binding::Cupin _2; Domain location=58-196::110-229::116-190
MVINVNCTSLQIFGRYWQGKSVVEPYDVDLKEICCQQYLAVISTFMVHDLTMWPLRCQISTKSDYINYPRADVGVLYWHLDPKKSESEEELAKIRRDRGYSYMDLIEICPDKLENYEEKVKNFFREHMHADEEIRYCLEGSGYFDVRDKDDKWIRIRIREGDMIIVPAGIYHRFTLDSAKYTKLMRLFIGEPVWTPLNRPEEDHPARQEYVKNVSAGTGFALAAHFLANTNLPSKPF

SEQ ID NO: 80188 - protein, 113 aa, Zea mays
  Coding DNA Sequence Number=SeqID_38409
MVEVSPTQQTSRGRSTVPREFGEGLHSGEGFPNPQGTSGPNSPPTRPTKPGELPRPRGYSESTADKQFDGGAAESMQILQSPVVRSSRCSPQTRAHLVYFGPWYFNLNFNLFI

SEQ ID NO: 80189 - protein, 86 aa, Zea mays
  Coding DNA Sequence Number=SeqID_38410
MVEVSPTQQTSRGRSTVPREFGEGLHSGEGFPNPQGTSGPNSPPTRPTKPGELPRPRGYSESTADKQFDGGAAESMQDKRYLLKPI

SEQ ID NO: 80190 - protein, 85 aa, Zea mays
  Coding DNA Sequence Number=SeqID_38411
MQESLAGPPSQQNPPEGLPRNPLQDRHHSKILPRAFPGIPCRTAITAKSSRGPPYTDHSPTALAPFGLFPDWTAHQKLESAGAKP

SEQ ID NO: 80191 - protein, 158 aa, Zea mays
  Coding DNA Sequence Number=SeqID_38412
MVEVSPTQQTSRGRSTVPREFGEGLHSGEGFPNPQGTSGPNSPPTRPTKPGELPRPRGYSESTADKQFDGGAAESMQMQLWTLLHNPSHSIKDPNQTGPPSQQNPPEGLPRNPLQDRHHSKILPRAFPGIPCRTAITAKSSRGPPYTDHSPTALAPFG

SEQ ID NO: 80192 - protein, 96 aa, Zea mays
  Coding DNA Sequence Number=SeqID_38413
MASSPVLAVSSIPVTPGFLGGPKPGREHNHQESLAGPPSQQNPPEGLPRNPLQDRHHSKILPRAFPGIPCRTAITAKSSRGPPYTDHSPTALAPFG

SEQ ID NO: 80193 - protein, 95 aa, Zea mays
  Coding DNA Sequence Number=SeqID_38414
MQESLAGPPSQQNPPEGLPRNPLQDRHHSKILPRAFPGIPCRTAITAKSSRGPPYTDHSPTALAPFGTEALMGRQYYYKNLGIGMDQFGVYMTFL

SEQ ID NO: 80194 - protein, 97 aa, Zea mays
  Coding DNA Sequence Number=SeqID_38415
MQESLAGPPSQQNPPEGLPRNPLQDRHHSKILPRAFPGIPCRTAITAKSSRGPPYTDHSPTALAPFGVHVKTVILNGREYYYKILGIGMTQFGAKMN

SEQ ID NO: 80195 - protein, 97 aa, Zea mays; identical to SEQ ID NO: 80194
  Coding DNA Sequence Number=SeqID_38416

SEQ ID NO: 80196 - protein, 99 aa, Zea mays
  Coding DNA Sequence Number=SeqID_38417
MQESLAGPPSQQNPPEGLPRNPLQDRHHSKILPRASLGIPCRTAMTAKSSRGPPYIDHSPTALAPFGVHVKTVILTDREYYYKILGIGMTQFGAKMNFL

SEQ ID NO: 80197 - protein, 97 aa, Zea mays
  Coding DNA Sequence Number=SeqID_38418
MQESLAGPPSQQNPPEGLPRNPLQDCHHSKILPRAFPGIPCRTAITAKSSRGPPYTDHSPTVLAPFGVHVKTVILNDREYYYKILGIGMTQFGAKMN

SEQ ID NO: 80198 - protein, 231 aa, Zea mays
  Coding DNA Sequence Number=SeqID_38419
  Homolog annotation: Hit_ID=Q8H047; Match level="QueryCoverage=22%, HitCoverage=6%, E-value=2e-15, Identity=74%"; Hit description =Putative serine protease
GVKRMIDPAPIYSQKCTLAAEDLAHRPINSAVAERWARAEQSKGETVNASGITQIKFKISAVQSSPVQSSPLFRLHFCSTAHRPLPLTRLIVVALHNTRQSLVLATPLHSTALLLHPALQIVSAVVSNAKHPATAAATSLCLAVSLTRSSPALHCLMRTQRNLLPLLLLLSAALLAVADAQERKNYVVHLEPRDDDGGGGSVEEWHRSFLPEATLDSAADDGPRIIHSYSH

SEQ ID NO: 80199 - protein, 80 aa, Zea mays
  Coding DNA Sequence Number=SeqID_38420
  Homolog annotation: Hit_ID=Q8H047; Match level="QueryCoverage=64%, HitCoverage=6%, E-value=9e-07, Identity=50%"; Hit description =Putative serine protease
MVLMNKAVEGYTIFADAHVLAASHVSHAAGSRIAEYAKSAPRPTASITFRGTSLSVDYVSKTEKPTPTPLFRRILFSLLL

SEQ ID NO: 80200 - protein, 101 aa, Zea mays
  Coding DNA Sequence Number=SeqID_38421
  Gene Ontology: Mol. function=subtilase activity; Biological process =proteolysis
  Homolog annotation: Hit_ID=Q8H047; Match level="QueryCoverage=59%, HitCoverage=8%, E-value=2e-23, Identity=83%"; Hit description =Putative serine protease
  Subcellular localization annotation: CTP_CleavageSite=75; ConfidenceScore=5.41e-01
MPLRCGVDMDVPDSTKNGRLTSSANSGCISLGTHAARMFMPGSVMSGFRMPGLALLGPRDEKMSGPSQRRNKTSTANSARRKRHARHRRPNSKFVGPQWAL

SEQ ID NO: 80201 - protein, 184 aa, Zea mays
  Coding DNA Sequence Number=SeqID_38422
MAAISPPAGGGIDDVFPSWRKSNIQVYPVTFPADGGGGGAGMAKQEVAPRRLSSESTAVTPQLLGGFWPPEAEAETKRPTFRAASGRSDWVRSRPPTYLTKRRSVGFRPKPCAVSLGFPRTLLHRRREPNGAPPVRTTCIVAGVRRFSYHFELKVFGSKIIWDSRTSVATSSQAKKRLPNIVLG

SEQ ID NO: 80202 - protein, 242 aa, Zea mays
  Coding DNA Sequence Number=SeqID_38423
  Subcellular localization annotation: CTP_CleavageSite=52; ConfidenceScore=5.40e-01
MGCCPTAPDSKRRTKFFLFLPFTLAWKNLVFASPSFSFWAASGRQKLKLKPNAQLLARLLGEAIGDADVLAPSSRFRVVPTIASASSLSYHFELKVFGSKIIWDSTTSVATSSQAKMDSADSIADKAIGRMQEIADKIFCVARETIRPGRGLTSFEATKLRVALEDIACMLEQDSLVLQEKLDNVNNVNNPADRSYEPSALSSPPPADVYLSPDWDFAEHFANFWGVEYDSDQMPSFSDNEV

SEQ ID NO: 80203 - protein, 530 aa, Zea mays
  Coding DNA Sequence Number=SeqID_38424
  Homolog annotation: Hit_ID=Q42456; Match level="QueryCoverage=43%, HitCoverage=42%, E-value=1e-99, Identity=79%"; Hit description =Aspartic proteinase oryzasin-1 precursor
  Pfam annotation: Domain name=Asp; Domain location=210-445; Score= -23.2; E_value=3e-12; Accession=PF00026.14; Description=Eukaryotic aspartyl protease
  Pfam annotation: Domain name=SapB_1; Domain location=473-510; Score =48.0; E_value=3.2e-11; Accession=PF05184.5; Description=Saposin-like type B, region 1
  Pfam annotation: Domain name=SapB_2; Domain location=396-443; Score =34.2; E_value=4.6e-07; Accession=PF03489.7; Description=Saposin-like type B, region 2
  Pfam module annotation: Pfam domain module=Asp::SapB_1::SapB_2; Domain location=210-445::473-510::396-443
MARQRMVCGVRRVQTPPRPVVGAGPDGKHTALEAVTIVLDLPPPQPGSMSGLTSVDMVPASDPKSAMALQRLVQATVWFLGENANYAASEYAWESATPPGTALMMLDADKMVAAASSRNPTLASALTRLQRCAFSGSWESNFSELQLSNGENQGASGTGLGSLTSPMLRVLDEMYRGQDDPVRDIRQRDNNKQEWSDEELKKLYETHERLLDFVSLLCFVPRAKYLPLGPTSAINPHAYTNETVFVQGVQKHEEEPEDLAVHHLPYSLPPSAWRRRPVSVEHQPRRSRYNMVKQGLISDPVFSFWFNRHADEGEGGEIVFGGMDSSHYKGDHTFVPVTRKGYWQFNMGDVLVDGKSTGFCAGGCAAVADSGTSLLAGPTAIITEINEKIGAAGVVSQECKTVVSQYGQQILDLLLAELCGNSTCYWVILQTQPAKICSQVGLCTFDGTHGVSAGIRSVVDDEAGKSNGGLKSDPMCNACEMAVVWMQNQLAQNKTQELILNYINQASLTDPEHRGVSVPFSMLLCLTISL

SEQ ID NO: 80204 - protein, 202 aa, Zea mays
  Coding DNA Sequence Number=SeqID_38425
  Gene Ontology: Mol. function=aspartic-type endopeptidase activity; Cellular component=lysosome; Biological process=sphingolipid metabolic process
  Homolog annotation: Hit_ID=P42210; Match level="QueryCoverage=99%, HitCoverage=41%, E-value=4e-86, Identity=75%"; Hit description =Phytepsin precursor (EC 3.4.23.40) (Aspartic proteinase) [Contains: Phytepsin 32 kDa ...
  Homolog annotation: Hit description=subunit; Phytepsin 29 kDa subunit; Phytepsin 16 kDa subunit; Phytepsin 11 kDa subunit]
  Pfam annotation: Domain name=Asp; Domain location=15-201; Score= -112.9; E_value=6.1e-07; Accession=PF00026.14; Description=Eukaryotic aspartyl protease
  Pfam annotation: Domain name=SapB_2; Domain location=18-65; Score =34.2; E_value=4.6e-07; Accession=PF03489.7; Description=Saposin-like type B, region 2
  Pfam module annotation: Pfam domain module=Asp::SapB_2; Domain location=15-201::18-65
MAIITEINEKIGAAGVVSQECKTVVSQYGQQILDLLLAELCGNSTCYWVILQTQPAKICSQVGLCTFDGTHGVSAGIRSVVDDEARKSNGGLKSDPMCNACEMAVLCERLPSPMGESAVDCGSLVSMPDIVFTIGGKKFKLKPEQYILKVGEGQAVQCISGFTAMDIPPPRGPLWILGDVFMGVYHTVFDYGKLRVGFAESA

SEQ ID NO: 80205 - protein, 60 aa, Zea mays
  Coding DNA Sequence Number=SeqID_38426
MAACVAVYGKLRRSRRLDTVQSGCTVLSIVKQGDLMVVANAPPEVTQRRTDNNDHSLSSG

SEQ ID NO: 80206 - protein, 208 aa, Zea mays
  Coding DNA Sequence Number=SeqID_38427
MGRLEPRAEWESQLVGKVCKLCRVLETDGPYLVHRTGRWSLRGRLPLPLSQRCLLHHHRASRLLEETLTETFSEHYSITEKDTAEAAMQDAARRALSQYCSLFSGVADGLDLKYYPRRSTGNAGGVIVSPVGEGNPKLSSMVNLAVVLNTELDHALDELGKVRAEVANCVLNARHTTILKVVLPPLSGFSTLTVHRPVVASTMVPQTA

SEQ ID NO: 80207 - protein, 55 aa, Zea mays
  Coding DNA Sequence Number=SeqID_38428
MGRLEPWAEWESRLVGKVCNLCRMLETGCPHCSQCSGGEAGNMDDFEEFQEYDEF

SEQ ID NO: 80208 - protein, 682 aa, Zea mays
  Coding DNA Sequence Number=SeqID_38429
  Gene Ontology: Mol. function=two-component response regulator activity; Cellular component=membrane; Biological process=two -component signal transduction system (phosphorelay)
  Homolog annotation: Hit_ID=Q9FXT2; Match level="QueryCoverage=86%, HitCoverage=77%, E-value=0.0, Identity=91%"; Hit description =Ethylene receptor homologue
  Pfam annotation: Domain name=GAF; Domain location=284-433; Score =57.2; E_value=5.3e-14; Accession=PF01590.16; Description=GAF domain
  Pfam annotation: Domain name=HisKA; Domain location=469-534; Score =22.2; E_value=0.00068; Accession=PF00512.15; Description=His Kinase A (phosphoacceptor) domain
  Pfam module annotation: Pfam domain module=GAF::HisKA; Domain location=284-433::469-534
MARGSKGTRVRGRGRITRGRGHVHGGEIVGERLEMADRPRDHGSAARRALDAAEERRHPQRGIDDGRLQSVQKCANARLNEAWLEVVEPMVVGTALLRGVSSAWILLFLSSLLLSPSAASVDFGHCGGCDDADDGALSSTYNILQCQKVSDFLIAAAYFSIPLELLYFATCSDLFPLKWIVLQFGAFIVLCGLTHLITVFTYEPHSFHLVLALTVAKFLTALVSFATAITLLTLIPQLLRVKVRENFLMNKARELDREVGRMKRKEEASWHVRMLTQEIRKSLDRHTILYTTMVELSKALELQNCAVWMPDETRSTMILTHQLRERDIMDPQKHSIPIDDPDVQEIKATKDAKVLGPDSALGVSSRSKHEAGPVAAIRMPMLRVSNFKGGTPEVMQTSYAILVLVLPNDGSLGWGRRELEIVEVVADQVAVALSHAALLEESQLMREKLAEQHRDLLQAKDEAMRAGDARNSFQTAMYDGMRRPMHSILGLVSMMQQESMNPEQRLVMDAIAKTSSVASTLMNDVMQTSTMNCEHLSLVRRPFNLHSFIKEVVGVVRCLTGCKGVEFEFQVENSLPERIIGDEKRVFHIVLHMVGTLTDRCNAGCISLYVNVHNEVEDRHNHDWMLRRANFSGGYVCVKFEIRIRKSKGYLLSSSSSQISQGSKPNNSEMGLSFNMCKKIVQ

SEQ ID NO: 80209 - protein, 982 aa, Zea mays
  Coding DNA Sequence Number=SeqID_38430
  Gene Ontology: Mol. function=two-component response regulator activity; Cellular component=membrane; Biological process=two -component signal transduction system (phosphorelay)
  Homolog annotation: Hit_ID=Q9FXT2; Match level="QueryCoverage=75%, HitCoverage=96%, E-value=0.0, Identity=93%"; Hit description =Ethylene receptor homologue
  Pfam annotation: Domain name=GAF; Domain location=272-421; Score =57.2; E_value=5.3e-14; Accession=PF01590.16; Description=GAF domain
  Pfam annotation: Domain name=HATPase_c; Domain location=569-696; Score=1.5; E_value=0.065; Accession=PF02518.16; Description =Histidine kinase-, DNA gyrase B-, and HSP90-like ATPase
  Pfam annotation: Domain name=HisKA; Domain location=457-522; Score =22.2; E_value=0.00068; Accession=PF00512.15; Description=His Kinase A (phosphoacceptor) domain
  Pfam annotation: Domain name=Response_reg; Domain location=722-838; Score=39.6; E_value=1.1e-08; Accession=PF00072.14; Description =Response regulator receiver domain
  Pfam module annotation: Pfam domain module=GAF::HATPase _c::HisKA::Response_reg; Domain location=272-421::569-696::457 -522::722-838
PSSRGEAVKEEGGKGEKKTLFSSVGRPRDHGSAARRALDAAEERRHPQRGIDDGRLQSVQKCANARLNEAWLEVVEPMVVGTALLRGVSSAWILLFLSSLLLSPSAASVDFGHCGGCDDADDGALSSTYNILQCQKVSDFLIAAAYFSIPLELLYFATCSDLFPLKWIVLQFGAFIVLCGLTHLITVFTYEPHSFHLVLALTVAKFLTALVSFATAITLLTLIPQLLRVKVRENFLMNKARELDREVGRMKRKEEASWHVRMLTQEIRKSLDRHTILYTTMVELSKALELQNCAVWMPDETRSTMILTHQLRERDIMDPQKHSIPIDDPDVQEIKATKDAKVLGPDSALGVSSRSKHEAGPVAAIRMPMLRVSNFKGGTPEVMQTSYAILVLVLPNDGSLGWGRRELEIVEVVADQVAVALSHAALLEESQLMREKLAEQHRDLLQAKDEAMRAGDARNSFQTAMYDGMRRPMHSILGLVSMMQQESMNPEQRLVMDAIAKTSSVASTLMNDVMQTSTMNCEHLSLVRRPFNLHSFIKEVVGVVRCLTGCKGVEFEFQVENSLPERIIGDEKRVFHIVLHMVGTLTDRCNAGCISLYVNVHNEVEDRHNHDWMLRRANFSGGYVCVKFEIRIRKSKGYLLSSSSSQISQGSKPNNSEMGLSFNMCKKIVQMMNGNIWSVSDSKSIGETIMLVLQFQLEPVTPVSGASSDLYRSSAIPNFNGLRVLLADSDCTNRAVTHRLLEKLGCRVLSVASGVQCISSFAAESSFQLVVLDLDMQTMDGFEVARAIRKFSSNSWLPLIIALAARIDDNIRDRCQRSGIIAIMVLKGQCGSLYVLFIRQALSLKTLPRRLSVVTADLLEIFYLKLESGAPAGGMHLTKPARPEPKERQRPSDLWLMMSLAFELSCPCLLQLAASSVPACLPNCTRMPHDQIHCSEVWAEVWYGMVLHTVWCLDAANLWRQMVLVALTAATYSCYSAAYMEE

SEQ ID NO: 80210 - protein, 458 aa, Zea mays
  Coding DNA Sequence Number=SeqID_38431
  Gene Ontology: Mol. function=hydrolase activity; Cellular component =nucleus; Biological process=metabolic process
  Homolog annotation: Hit_ID=Q67IZ5; Match level="QueryCoverage=69%, HitCoverage=84%, E-value=1e-127, Identity=70%"; Hit description =Putative PrMC3
  Pfam annotation: Domain name=Abhydrolase_3; Domain location=135-357; Score=175.2; E_value=1.6e-49; Accession=PF07859.3; Description =alphabeta hydrolase fold
MVAKTRTRRQLAKLALLLLALLLLLAAILLCVFLIPRHHRRPLPPASPPGAGNASNPDDSIVAFDFSPYLIMYKSGRVNRLDGTARCSAGVDEATGVTSKDVVIDSGTGLAARMYLPPAPRGTQSKGLGKRHPVLVFYHGGAFVIESAFTPLYHAYLNGVAAKARVVAVSVEYRLAPEHRLPTAYDDSWQALNWVARNAGSGPEPWLRDRGNLSRLFVAGDSAGANIAHDMAMRAGTGGGLDGGAAIAGLLLLDPYFWGKKPVAGETTDPARRRQYEATWSFICGGRYSIDDPLVDPLSMPASEWRKLACSRVAVTSSGLDDFRPRGLAYVAALRDSGWDGETEQYETPGERHVYFLDRPKDPNSVKELAFVTGFLSRECKGCDGLYSGSCPMLVVAEDGKATTVSASLLLRNCGSGSTLGIGVEGVENEGPGVHIHCRTPFLAVISSAGRGYQPATN

SEQ ID NO: 80211 - protein, 134 aa, Zea mays
  Coding DNA Sequence Number=SeqID_38432
  Subcellular localization annotation: CTP_CleavageSite=48; ConfidenceScore=5.33e-01
MGTGFLMGIYIFHGYGFGTAKPSGFVPVAISNRATTTPAPLVRRRLVPASSRRYHGKKGSPAVDVYARAFVLDALYPYPERAAATTVPQQQRSRDRRSFAVFRYHKHWAATRVQPVAAFAPKNRKQRDRVHNPS

SEQ ID NO: 80212 - protein, 482 aa, Zea mays
  Coding DNA Sequence Number=SeqID_38433
  Gene Ontology: Mol. function=protein dimerization activity; Biological process=regulation of transcription, DNA-dependent
  Homolog annotation: Hit_ID=Q75KD5; Match level="QueryCoverage=43%, HitCoverage=58%, E-value=8e-30, Identity=36%"; Hit description =Expressed protein
  Pfam annotation: Domain name=zf-BED; Domain location=123-175; Score =39.5; E_value=1.2e-08; Accession=PF02892.5; Description=BED zinc finger
  Subcellular localization annotation: CTP_CleavageSite=38; ConfidenceScore=5.29e-01
MEEENTPLPASLGSRSRTRTKQLTKKPPISMQKMHAATASSASGNRSNVSISVEPTTNSREEEDKDEDNSLDMEDDFSLSLSSEDGGSQGEDEVHNAKRGVKRAKGDVPLSPSKCKVKRVKRADCWKYFKVVEVQSKKKFGEMVTKAKCKFCYKLYVYQPGGPTSQLNRHLDKCTAYQNKLANAKSKVAQGTISFALDDGSLVVNPTEYDHDHTRNLIAKMIIVHEYSLRMVEHRWFNILMKWMNNSYESIGRKTIKNECMKVAAFGYYAEKDHNYLWEPSQSQWDMYEQIRPILGTMAGATTAFSGSLYPTANVFYPYIVKVKIALIGAKNSGDPYLWSMAVAMLEKFDKYWEKRNNIMVIATILDPRFKMSWIRGSQHEKTAPILVEGDDGDIEFVEFPKAAGQRHATRLTPASDPLLTRHPEMATAAAFSVSSPAASAVAARSKAELRAVPCRHSVPPAHSRLVSVDWGGLNVTCSGFV

SEQ ID NO: 80213 - protein, 82 aa, Zea mays
  Coding DNA Sequence Number=SeqID_38434
  Gene Ontology: Mol. function=transferase activity, transferring nitrogenous groups; Cellular component=chloroplast; Biological process=amino acid metabolic process
  Homolog annotation: Hit_ID=Q84V24; Match level="QueryCoverage=86%, HitCoverage=17%, E-value=2e-30, Identity=91%"; Hit description =Aspartate aminotransferase
MALAVDVSRFEGVPMAPPDPILGVSEAFKADKSELKLNLGVGAYRTEELQPYVLNVVKKAKNLMLEKGGNKEVQWRSEQFDA

SEQ ID NO: 80214 - protein, 487 aa, Zea mays
  Coding DNA Sequence Number=SeqID_38435
  Gene Ontology: Mol. function=transferase activity, transferring nitrogenous groups; Cellular component=chloroplast; Biological process=amino acid metabolic process
  Homolog annotation: Hit_ID=Q84V24; Match level="QueryCoverage=84%, HitCoverage=100%, E-value=0.0, Identity=94%"; Hit description =Aspartate aminotransferase
  Pfam annotation: Domain name=Aminotran_1_2; Domain location=111-479; Score=476.8; E_value=2.6e-140; Accession=PF00155.11; Description =Aminotransferase class I and II
  Subcellular localization annotation: CTP_CleavageSite=77; ConfidenceScore=5.66e-01
MATAAAFSVSSPAASAVAARSKAELRAVPCRHSVPPAHSRLVSVDWGGLNVFGGVNQARTRTGCRVGITRKNFGRVMMALAVDVSRFEGVPMAPPDPILGVSEAFKADKSELKLNLGVGAYRTEELQPYVLNVVKKAENLMLEKGENKEYLPIEGLAAFNKATAELLLGADNPVINQGLVATLQSLSGTGSLRLAAAFIQRYFPEAKVLISSPTWGNHKNIFNDARVPWSEYRYYDPKTVGLDFEGMIADIEAAPEGSFVLLHGCAHNPTGIDPTPEQWEKIADVIQEKKHMPFFDVAYQGFASGSLDEDAFSVRLFVKRGMEVFVAQSYSKNLGLYSERVGAINVVCSAPEVADRVKSQLKRLARPMYSNPPIHGAKIVANVVGDPTMFGEWKQEMELMAGRIKNVRQKLYDSLSAKDKSGKDWSFILRQIGMFSYTGLNKAQSDNMTDKWHIYMTKDGRISLAGLSLAKCDYLADAIIDSFHNVN

SEQ ID NO: 80215 - protein, 310 aa, Zea mays
  Coding DNA Sequence Number=SeqID_38436
AAGTLRPSTRWMRILGEISLRVEDPVVKESAGALYDRMWGSYGREVVRARAEAARAQAERGERVDDFGALNSAPPEPETTPAEAATGVALGLTLVTAEDAPGALVPAAAGEGLLPRVAEGASDAPAAAVPGAEDPAEATAEAAAEAPAAAGPSQVQDFGPAHATATTGFLAASTAEGGNECGGSVSEFFDFTDSGSSVEWTEESSEEDLDYFAALDVATAEAALHAADAPSVPGPSTGHRRRRAVAKRRISAEEGARLRVSRVGRQELLSLPAVSGVGEGELRSLFAGEELRIMLFNYREMGIIPKVEPM

SEQ ID NO: 80216 - protein, 100 aa, Zea mays
  Coding DNA Sequence Number=SeqID_38437
  Subcellular localization annotation: CTP_CleavageSite=57; ConfidenceScore=5.80e-01
MASAQQQLHLPSPLLSPCPWPAFPGTLRSVSRPKLPQWTARRDARRVFAVLRSPNIVVVHPRNPVFFVEEKASRSTLVDVQSYAQIEIAIVLTNADWVCL

SEQ ID NO: 80217 - protein, 215 aa, Zea mays
  Coding DNA Sequence Number=SeqID_38438
MALGAHAAGCRPGEPAAEAPLQLGFSPPMAPLFSSSCLVHLPAQHLPAYVLCCSTGRELHPLQWTSCRGFSMDVPLPAHVKGLQHLLSLARSHGWHPSMASAQQQLHLPSPLLSPCPWPAFPGTLRSVSRPKAPQPRRLRTLSARCFVKPVDSTPGCPPGVCCFAQPQHRRRSPPRNPVFFVEEKASRSTLVDVQSYAQIEIAIVLTNADWVCLW

SEQ ID NO: 80218 - protein, 309 aa, Zea mays
  Coding DNA Sequence Number=SeqID_38439
MASRAARKPNASIRVACHLAAETPRGCKNSVIILHVPFGPVSAARENFWGQLLGRGRRRGRPLRGDSQGGREPRRHEPPRARRRAQRSGVGSGGAAEDWLLVVAGGNNAGCRADRAASTADLAIPGGTKGFFINKWSPKEELKHQDAREGYPWLPATKEQQGRLAPSGGAHPGILGSRDYTPWVLTPLGSLPPAAKGSLTQPSRPALWATASMAKGRQGQRNISHAAVTPSLLRSYAASRRCKQASDLTRLRKVIEQFKALADLKTVDVLRKATKLGCTGNDDTKSCTTLNEGIFSLWADKRTFYPFFI

SEQ ID NO: 80219 - protein, 298 aa, Zea mays
  Coding DNA Sequence Number=SeqID_38440
MASRAARKPNASIRVACHLAAETPRGCKNSVIILHVPFGPLLGRGRRRGRPLRGDSQGGREPRRHEPPRARRRAQRSGVGSGGAAEDWLLVVAGGNNAGCRADRAASTADLAIPGGTKGFFINKWSPKEELKHQDAREGYPWLPATKEQQGRLAPSGGAHPGILGSRDYTPWVLTPLGSLPPAAKGSLTQPSRPALWATASMAKGRQGQRNISHAAVTPSLLRSYAASRRCKQASDLTRLRKVIEQFKALADLKTVDVLRKATKLGCTGNDDTKSCTTLNEGIFSLWADKRTFYPFFI

SEQ ID NO: 80220 - protein, 163 aa, Zea mays
  Coding DNA Sequence Number=SeqID_38441
LIRAELAGRVGGHGSHRGAMGGGAQNCSWSCLKGGEPEEGCARPGEKGGDHRAPGNREPSAMGEARLGACHGGASARRPKQGRWSSRPWEKKGRGGSMLGRRLEEEGLGRHGEEGSRAPCALGRRCCCVWGKKTGRLWRLEIVEGWECKITKCKERGLLFIGM

SEQ ID NO: 80221 - protein, 311 aa, Zea mays
  Coding DNA Sequence Number=SeqID_38442
STTRHGLSPNTNATAWVGTAQIERSTRCGGDPRLLFWTGIAAQRTWMPWLPAEQGFLAVALGGKEVGGEQQQGRGWCCPWLGELARTALMPVWNREEKRRAPLGRGGRQLGEDCRARLVERERSRDELKAHPAWAFPGRAGKSRGRHEWGGAELAGRVGGHGSHRGAMGGGAQNCSWSCLKGGEPEEGCARPGEKGGDHRAPGNREPSAMGEARLGACHGGASARRPKQGRWSSRPWEKKGRGGSMLGRRLEEEGLGRHGEEGSRAPCALGRRCCCVWGKKTGRLWRLEIVEGWECKITKCKERGLLFIGM

SEQ ID NO: 80222 - protein, 94 aa, Zea mays
  Coding DNA Sequence Number=SeqID_38443
  Subcellular localization annotation: CTP_CleavageSite=89; ConfidenceScore=5.18e-01
MPVQNSSLGSPPHRVLRSICAVPTHAVALVFGDSPCRVVDLRSSTVYASHFAGSAQPQHRRRSPRRCGVQLCWSVGRYKNVLVIGRSKVAFTFW

SEQ ID NO: 80223 - protein, 117 aa, Zea mays
  Coding DNA Sequence Number=SeqID_38444
  Subcellular localization annotation: CTP_CleavageSite=86; ConfidenceScore=5.22e-01
MPVQNSSLGSPPHRVLRSICAVPTHAVALVFGDSPCRVVDLRSSTVYASHFAGSAQPQHRRRSPRRGTPCFAWRRRQVVQRSSTFEVMRKSESPSSLQTPIGFVYGEPMHVALDRLD

SEQ ID NO: 80224 - protein, 66 aa, Zea mays
  Coding DNA Sequence Number=SeqID_38445
MALRAAGLLFWLRREAPHVLRGEEGKSFNARRHSKLCANRESPSSLQTPIGFVYGEPMHVALDRLD

SEQ ID NO: 80225 - protein, 163 aa, Zea mays
  Coding DNA Sequence Number=SeqID_38446
  Gene Ontology: Mol. function=coproporphyrinogen oxidase activity; Cellular component=chloroplast; Biological process=porphyrin biosynthetic process
  Homolog annotation: Hit_ID=Q2F7H8; Match level="QueryCoverage=79%, HitCoverage=34%, E-value=2e-68, Identity=88%"; Hit description =Plastid coproporphyrinogen III oxidase
  Pfam annotation: Domain name=Coprogen_oxidas; Domain location=1-160; Score=71.7; E_value=1.9e-20; Accession=PF01218.9; Description =Coproporphyrinogen III oxidase
MRLTGRRVWVLRSRTHPKIPDGYMILSNNAPAGDKMLPHPPLYRVLHPKNPFAPTLHFNYRYFETDAPKDAPGAPRQWWFGGGTDLTPSYIIEEDVKHFHSVQKQACDKFDPSFHPRFKKWCDDYFYIKHRNERRGLGGIFFDDLNDYDQEMLLNFATSETIC

SEQ ID NO: 80226 - protein, 183 aa, Zea mays
  Coding DNA Sequence Number=SeqID_38447
  Gene Ontology: Mol. function=coproporphyrinogen oxidase activity; Cellular component=chloroplast; Biological process=porphyrin biosynthetic process
  Homolog annotation: Hit_ID=Q2F7H7; Match level="QueryCoverage=61%, HitCoverage=27%, E-value=1e-67, Identity=100%"; Hit description =Coproporphyrinogen III oxidase
  Pfam annotation: Domain name=Coprogen_oxidas; Domain location=1-180; Score=83.0; E_value=9.1e-22; Accession=PF01218.9; Description =Coproporphyrinogen III oxidase
MQEQDASAVQALSDSAISMGSWGLGDWRLGFWESEHRAADRASEAPSGEPAAAAWVGAWGERARVLHPKNPFAPTLHFNYRYFETDAPKDAPGAPRQWWFGGGTDLTPSYIIEEDVKHFHSVQKQACDKFDPSFHPRFKKWCDDYFYIKHRNERRGLGGIFFDDLNDYDQEMLLNFATSETIC

SEQ ID NO: 80227 - protein, 61 aa, Zea mays
  Coding DNA Sequence Number=SeqID_38448
  Gene Ontology: Biological process=cell differentiation
  Homolog annotation: Hit_ID=Q5SNH3; Match level="QueryCoverage=67%, HitCoverage=13%, E-value=1e-10, Identity=63%"; Hit description =Putative pollen specific protein SF21
MSYFQGFFFCPEVASLLLHNFCVYHINPQGHEVSDDGSIPVIRWREEVLLKSPLSVVEIGK

SEQ ID NO: 80228 - protein, 136 aa, Zea mays
  Coding DNA Sequence Number=SeqID_38449
  Gene Ontology: Biological process=cell differentiation
  Homolog annotation: Hit_ID=Q5SNH3; Match level="QueryCoverage=56%, HitCoverage=23%, E-value=8e-29, Identity=73%"; Hit description =Putative pollen specific protein SF21
MPNGGWVHDDEDIVDAALICLTLHVPMHLDLVTILAGYIAKEHLVRTRCGSVTVAVYGDEDKPALITYPDVALNYMSYFQGFFFCPEVASLLLHNFCVYHINPQGHEVSDDGSIPVIRWREEVLLKSPLSVVEIGK

SEQ ID NO: 80229 - protein, 217 aa, Zea mays
  Coding DNA Sequence Number=SeqID_38450
MRDPAPESQGRALERVGEDSARGAWGRTNATPWELVPLSHRSASRIFITQPGRTPSPAVTRDGDLQLDGGGKRAGLRPLPLPQPQGFSSPRLGRGECRVGVGPCVGGGPLLHSVMGGEAGIARGVRQLQRAWSSAASGFGATCGVGVCHGSRKRFFRRRDGRDWPRADLQLLRPSARPCLTSFGTGGGLLAAASTLRSALPLFGPPEQKSPSSPLLE

SEQ ID NO: 80230 - protein, 91 aa, Zea mays
  Coding DNA Sequence Number=SeqID_38451
PIQPSETSVYAPVKLPERGIEAYFAGEASPRSPELSTPPEFVDRYTRHRRELPPAHVDRTIPTIPAVKPHLAVTARTSPSQPYPSPDLSRR

SEQ ID NO: 80231 - protein, 249 aa, Zea mays
  Coding DNA Sequence Number=SeqID_38452
  Subcellular localization annotation: CTP_CleavageSite=28; ConfidenceScore=5.20e-01
MWHTTQGTHWKKLSPRLGRLTCLGMVFVARLKAPRVRRALSLPEHARACPASRQRPADALSRARAYKALPGVGYTLPRTLKPHRPIQPSESSVYALVKLPERGIEAYFAGEASPRSPELSTPPEFVDRIAVVWPVHSPPTRTPACAREPGDSGHPRCEAAPRCDRQSLPEPTLPFAGPISPPEVAPDPAPEPAPEDLPATALEGKPRNPFEMNTSSLEEMVAGVTWPSILPPGWTVEWDPASAEEEHEE

SEQ ID NO: 80232 - protein, 86 aa, Zea mays
  Coding DNA Sequence Number=SeqID_38453
MTTSLVARRSMPGCGLSPTLSFKDVHHPRCDGSIRRGRVFTSPAGGVDLGYTGPADCRLSATACLALWGWMALVPPPALPPAVWAH

SEQ ID NO: 80233 - protein, 424 aa, Zea mays
  Coding DNA Sequence Number=SeqID_38454
MTTSLVVGRSKLGCGLSPTLSFKDVHHPRWGGRRVEPGPYPPYGLAVSCSVSGPLGLDGSGAASDVASCRLVGAWLPIHRTGDSRAMRGFATSMPSLPDGRTGGPYKTSYAAAVAAAFLDGLVLTPVGRTRARTPSCVLRQPPPIGAEVVAAAEAVVAVGADVVASAGSRYGTRLSDYMVSGPPPGDKCSFFRAGPPGSRHGTRLSDCTCSGPPQETNVHSLALDMVERLHGLRTTLWNGVPFSRAIPQAVGPPYFRVRGPKLQAWLFNSDVAMSDKWKPYGLIVRVYGGRPHRVVIHEPSPLAVITSACTCLQLGPVGVRKGLRRKACFSSVGRGTRGPSEVHLVVFTGVGASSEDILQVPLGRLIPKVPLNRGYLVVVHLLFVGPSARRGAVFGGLFADAFCEVNDLVTLCGAVATMRVHRA

SEQ ID NO: 80234 - protein, 243 aa, Zea mays
  Coding DNA Sequence Number=SeqID_38455
MGEIRRLSASSLEERNSVGVGTFQPSFGFKDFHQLARLYPPPAVTQDGDYQPLGGENFKDVHHPRWGGGRAEPELYLPRGFVGHPLPAVFEGEGARWPCGRAGLRQREAGQRRASSAPACRARRLGSRRPLMPEGGCRAVCTGGPPKMSRAARAAFVFWGGPAFAPVWRLRAEVGAPLVWEDLSGDLPGAAPVVGAKVEAAREVPVADGTTATIRASGLRLFVLVLAPRAPTWARARLQQHPP

SEQ ID NO: 80235 - protein, 182 aa, Zea mays
  Coding DNA Sequence Number=SeqID_38456
MGEIRRLSASSLEERNSVGVGTFQPSFGFKDFHQLARLYPPPAVTQDGDYQPLGGENFKDVHHPRWGGGRAEPELYLPRGFVGHPLPRCSRERALAGPAGGPDFDNARLVNGGRRQPQRVELVGLAPGGPSCRKAAAAPCAREDRPRCRALLGRRSCSGAVLPLHRYGASARRSVPHSSGRI

SEQ ID NO: 80236 - protein, 199 aa, Zea mays
  Coding DNA Sequence Number=SeqID_38457
  Subcellular localization annotation: CTP_CleavageSite=29; ConfidenceScore=5.41e-01
MSSRSLMHRVFPPPKTPNGGDPPSFRLVVGGRNSVGVGTFQPSFGFKDFHQLARLYPPPAVTQDGDYQPLGGENFKDVHHPRWGGGRAEPELYLPRGFVGHPLPRCSRERALAGPAGGPDFDNARLVNGGRRQPQRVELVGLAPGGPSCRKAAAAPCAREDRPRCRALLGRRSCSGAVLPLHRYGASARRSVPHSSGRI

SEQ ID NO: 80237 - protein, 126 aa, Zea mays
  Coding DNA Sequence Number=SeqID_38458
MAERYQLPRSCVLPTTRRKDGGYPPSGGLEDGKTRCIREREDMVAFQGGTGKGGYPEKDPSPRRNQAPSPPTDQRGSGAALANPAPVEPLTASTYQPENLGPDRTPGLRPARMRECPDQPKHYVRH

SEQ ID NO: 80238 - protein, 180 aa, Zea mays
  Coding DNA Sequence Number=SeqID_38459
  Homolog annotation: Hit_ID=Q6QP51; Match level="QueryCoverage=23%, HitCoverage=19%, E-value=2e-09, Identity=71%"; Hit description =Putative growth-regulating factor 1
MAERYPLPRSCVLQQRGRKTADIPHPGAWKGPRKGDTPKRILPREGTRLRASLLIKGSKAGPPEGFDSRLRSRGPYTHYWSEVRRPAPRKGSTAASGYSGSAPITDQGFEGWPPKGSQPPQTPSEGLPWRLGGCSRKPGSGRTVDSVNIPARELGTRPYTRATASSHEGRPDQPKHYARH

SEQ ID NO: 80239 - protein, 311 aa, Zea mays
  Coding DNA Sequence Number=SeqID_38460
MNQQEAPTGVGEFLRDFGVPVVLWRLLQEVGYTEAPKYQWSRTVLRGQPWYEVVVRIPERDRKPSWPYWMFHAEGMTPWEGAQVAALEVLTTICYQKREEIQATSMRLFPAVALSDPLVYHHQARVMESIPIGQDSVESASARVLMAVLELQLTRGHSRQKWQQLYTGSYAAFKMMETAKNRACTQAQERLEETKVQAEQVIGLEHQVTELQMQHQADQNRIKELEHQLTNAHSKLKILSQQQEEIYLYAVAVREDLKETMSYISHQDQAIKELNRAHPMEFQVAQRLVNHLQQSVHRLNAAVDPTPASVD

SEQ ID NO: 80240 - protein, 111 aa, Zea mays
  Coding DNA Sequence Number=SeqID_38461
VIGLEHQVTELQMQHQADQNRIKELEHQLTNAHSRLKILSQQQEEIYLYAVAVREDLKETMSYISHQDQAIKELNRAHPMEFQVAQRLVNHLQQSVHRLNAAVDPTPASVD

SEQ ID NO: 80241 - protein, 118 aa, Zea mays
  Coding DNA Sequence Number=SeqID_38462
MAKPGHATPPGPLLRKQQPTRPSIPVAGMEAKSHHPPNQGGTCKNYATSKAEYTNTQLDLPGIRTLILIPISCHRQHIPMDPCPQTIIILLSKWIQPIPDLARELEKSLDFYRDSDLA

SEQ ID NO: 80242 - protein, 90 aa, Zea mays
  Coding DNA Sequence Number=SeqID_38463
MKAKSHHQPNQGGTYKNYATSKAEYTNTQLDLPGIRTLILIPISSHRQHIPMDPCPQTIIILLSKWIQPIPDLARVLEKSLDFYRDPDLA

SEQ ID NO: 80243 - protein, 208 aa, Zea mays
  Coding DNA Sequence Number=SeqID_38464
  Homolog annotation: Hit_ID=Q6QP51; Match level="QueryCoverage=56%, HitCoverage=55%, E-value=8e-35, Identity=61%"; Hit description =Putative growth-regulating factor 1
MGSRSSNKPQDEGNMGAPHPGARKESPLPRHEDDAPVLRSSSTRNGRPANCPSRRINSSAGQATPLAGTEKGDILKRILPGEGNGPPSPPTDHGFEGWPLGRAGPSEGFDSRPRARRVRDDSGYVCYMAEALATLPRIPPEEGIEPSDPIEWVRVRQITYSHFALSLTDLTGKQRRSTRFDCCASHPGKADNSKFSLGRNRKLRLARP

SEQ ID NO: 80244 - protein, 113 aa, Zea mays
  Coding DNA Sequence Number=SeqID_38465
  Subcellular localization annotation: CTP_CleavageSite=64; ConfidenceScore=5.44e-01
MAEPPSSLAAQLTVQGAQKIPAASPFLAVRRGARRLFDKMRSKPRAAVALLFDLHSPHRVSSLSCSLRSPIRDAVETLASGRRCASRLARSTKCRAMWTAHASSHDSFRLIDL

SEQ ID NO: 80245 - protein, 224 aa, Zea mays
  Coding DNA Sequence Number=SeqID_38466
VGGGAHCWNFLGSLDSELGGQGGRGSAMGDGDSLRVLFGGEDGGGDGAAALRRDAAGRRTEGILGAMAAGRSWSSAATEGRLAMELLLGLGAMAEGAWNRQPTGGCRCRKAGRRRAPWGFLLRDGEGAESSAATMAGPWRRGKRRADGHVEGGAELLVSTGSHVGRRVPWIRAGGACSKGLGQRPSREVEAPWEEGSRAPCALGKKAPCCAWGKKPERLWRLEK

SEQ ID NO: 80246 - protein, 188 aa, Zea mays
  Coding DNA Sequence Number=SeqID_38467
MSCCTRKASSVALLPFPPVGGAASPVSRGLPQKEPGRGVGWGPLLDGDGWSNSHRRGERTGTARASAGLLASETMQLASGTGAPPSLSKSCGSALRQNTGLSSRNPSKSGGKSAPRRRSRTSPSLADAMEIPESSPPLWPTAQGRDGSQSGLAHGVVVEDPAPPLLPLLGWGGGGQSRTWTRRGGGRG

SEQ ID NO: 80247 - protein, 789 aa, Zea mays
  Coding DNA Sequence Number=SeqID_38468
  Homolog annotation: Hit_ID=Q84PF3; Match level="QueryCoverage=25%, HitCoverage=49%, E-value=9e-95, Identity=79%"; Hit description =Brittle 2
  Pfam annotation: Domain name=NTP_transferase; Domain location=577 -787; Score=100.4; E_value=5.5e-27; Accession=PF00483.13; Description= Nucleotidyl transferase
  Pfam annotation: Domain name=Trehalose_PPase; Domain location=269 -450; Score=-63.3; E_value=0.0099; Accession=PF02358.7; Description =Trehalose-phosphatase
  Pfam module annotation: Pfam domain module=NTP_transferase::Trehalose_ PPase; Domain location=577-787::269-450
  Subcellular localization annotation: CTP_CleavageSite=54; ConfidenceScore=5.49e-01
TAPAPCPATASRASRPAVLRTPARRTRRESSSRAPHPPRIQLLHARASASLLPPARQRPQRREPRRQQRHKESRHLDSAATSPFPGYPRPPPRRVHVRDCPPPPQPRSGSSGGAGSSTTTPWASPDWLPSLPCAVGQSGGDDSGISIASAKLGEVRDLLRGALFPPLFEGLREERPVFCLSADPQDFDREGGAPVPLASCIVSDAWQPSDQAGMRERDLGGEPIHPRRPHHPHPAAFKSASTFCSPTPPAPLALPAVQHWRGPSPSVPLADASCSSRHRQVTAPTPPRVQAPSGGGRGSPGWLRPPPAGTAIVPHWTLSWCSTTWRTSTWTGGVGREPAASPPVVYTQHHNEADPDFGSCWYKEMLDHLDNVLDNEPVVVKRGQHIVEVNPQSISKGMVDSLLSSIVRTGTDLVDGMEDAAKVFDEMLTKGEEVPSAVMYNALINSYCTGANMEGLCADNTRQLVDIMDWIVDTEITLLRDNNRPKPGGNVTFGELLKSSVLTEGVRVLMLVWNARTFVECQLKQYPWEQEQMASMKEYIARFGPGSAKLVRGIKQPWPPPRAVPPRLDYSDDEASVGSAGTRLYPLTKKRAKPAVPLGANYRLIDIPVNSCLNSNISKIYVLAQFNSAFLNRHLSRAYGSNIGGYKNEGFVEVLAAQPSPDNPNWFQSTADAAHRETYADITVAALPMAEKRATAFGLMKIDEEGRIIEFAEKTKGEQFTEMMVDTTILSLDDVRAKEMPYIASMGIYVFSKDAMLQLLREQFPEANDFGSEVIPGARQNPKETARVT

SEQ ID NO: 80248 - protein, 159 aa, Zea mays
  Coding DNA Sequence Number=SeqID_38469
  Homolog annotation: Hit_ID=Q6ZBH9; Match level="QueryCoverage=93%, HitCoverage=10%, E-value=9e-67, Identity=83%"; Hit description =Probable protein NAP1
MAHVSFKSKDVDSGMSRWSEYLSVEEPIPSAMATWRNMSADAPQGSSAGSHKHLQMEPVVQLSKVAEGLLAKMYRLNSILDYPDPNTHTFSDAFWKAGVFPNFPKICITMSKKFPEHPNKLQLERVDKFGLDALNENAEGYMHNLEQWILGKTAYYRPK

SEQ ID NO: 80249 - protein, 263 aa, Zea mays
  Coding DNA Sequence Number=SeqID_38470
  Homolog annotation: Hit_ID=Q6ZBH9; Match level="QueryCoverage=87%, HitCoverage=16%, E-value=1e-110, Identity=85%"; Hit description =Probable protein NAP1
MAHVSFKSKDVDSGMSRWSEYLSVEEPIPSAMATWRNMSADAPQGSSAGSHKHLQMEPVVQLSKVAEGLLAKMYRLNSILDYPDPNTHTFSDAFWKAGVFPNFPKICITMSKKFPEHPNKLQLERVDKFGLDALNENAEGYMHNLEQWILLLLDLLAFREQALRLILDLSSTVITLLPHQNSLILHAFMDLFCSFVRVNLFSDKMPRKMILQVYNILHIMLKGGRDCEFYHRAKHNSKIEGQPNRLEKYLQLLINLKDFKDKL

SEQ ID NO: 80250 - protein, 59 aa, Zea mays
  Coding DNA Sequence Number=SeqID_38471
MEMQQRQLELGQVIGERDQSRSQAAEAVGRAEALRESVKALAQAAEQKEADRVAMSDAI

SEQ ID NO: 80251 - protein, 64 aa, Zea mays
  Coding DNA Sequence Number=SeqID_38472
  Gene Ontology: Mol. function=nucleic acid binding; Cellular component= nucleus; Biological process=response to salicylic acid stimulus
  Homolog annotation: Hit_ID=Q14SM5; Match level="QueryCoverage=56%, HitCoverage=11%, E-value=3e-15, Identity=100%"; Hit description =Transcription factor MybS3
MEVDPCDKEAVFLRPQNYEKFLANPLSRAFVIPAKTSGVLLQSKEHLSEQPYSATWHRKPKMRP

SEQ ID NO: 80252 - protein, 51 aa, Zea mays
  Coding DNA Sequence Number=SeqID_38473
  Gene Ontology: Mol. function=nucleic acid binding; Cellular component= nucleus; Biological process=response to salicylic acid stimulus
  Homolog annotation: Hit_ID=Q14SM5; Match level="QueryCoverage=71%, HitCoverage=11%, E-value=1e-14, Identity=97%"; Hit description =Transcription factor MybS3
MEVDPCDKEAVFLRPQNYEKFLANPLSRAFVIPAKTSGVLLQSKEHLSEQP

SEQ ID NO: 80253 - protein, 855 aa, Zea mays
  Coding DNA Sequence Number=SeqID_38474
  Gene Ontology: Mol. function=helicase activity; Biological process =viral genome replication
  Homolog annotation: Hit_ID=Q1EPC6; Match level="QueryCoverage=77%, HitCoverage=44%, E-value=0.0, Identity=64%"; Hit description=DNA helicase homolog, putative
MDPLPNNDARSPLKELSNITVEDAQAPTGSLFSSEHMAIPELIPTPFVPTPLVTEDVETNNLTTSPRRKGHNCHVSYGERQIWVSRQNQEFQSAIGRKFSTATMDCEMESDGDNEIDHLTTFEINNNVPATNSDKMTEGVDVGKQHQTNSTITTNGDDDETVLFKDDDEEEGYLFAGQDGESGEDIEIDETQDAFTVNPDVPDLYDKVYSNIPEETHLLSTVPDCDYCKAKKFQYEPPGFCCRNGQINLAALETPPQLRRLWECADADARHFRDNIRFFNGHFSFTSLYCCLDSMTTNMDCGIYTFRAHGMMYHNVRSFGREDGAEHKHLELYFYDDDPSLEHRYRKCRQEQLEKDKAIIKQLVEIFKGNPYSEHLRSMGHVDNVENYHIALNLDQTLNQKLYNVPITSEVAAVWIEGSERRGELGWHANIPKSNVSMAEVDAYRDQHRTRNANDDDTGIFNPILYGKRLFQQFAVDTYIKIESSRLDFIRKNQDRLRADLYKGLVDSLHEGENRADKIGKRTVLSTSFIGGPRDMRRRYMDAMALVRKFGKPDIFLTMTCNPNWDEITTELLPMQSPQDRPDLVVRIFHAKLEELKKRLTKHHILGKIRSYVYVVEFQKRGLPHAHFLLIVQRKYKLTCPDQYDLLISAEIPDKKKYPQLYKMVIKHMMHGPCGLLNPKCPCTKGRASCKNHYPRAFSNATSQGKDSYPIYRRRDDGRKETVRGCELDNRWVVPYNPYLLRLFNCHINVEACGNIKAVKYLFKYIYKGHDRASVAVTDANKADGDVDEIKQYRDARWVTPPEALWRIFSFDLSQNSPPVMQLQLHLENMHMVSFHERAKVNHVVQRPGADSEST

SEQ ID NO: 80254 - protein, 74 aa, Zea mays
  Coding DNA Sequence Number=SeqID_38475
  Subcellular localization annotation: CTP_CleavageSite=30; ConfidenceScore=5.39e-01
MARRPGLAVPASRPCPGAAPPPGVPTLGTPAMPVSVAARPWGLERFLECLSVRTCSLDDRPGKQCNHKGGMGCP

SEQ ID NO: 80255 - protein, 67 aa, Zea mays
  Coding DNA Sequence Number=SeqID_38476
MAAHRTVNNACSVAHRTVWGLERFLECLSVSTCSLDDRPGKQCNHEGGNEGVEVDLQEFQDFDEFED

SEQ ID NO: 80256 - protein, 71 aa, Zea mays
  Coding DNA Sequence Number=SeqID_38477
MGKSKKGGSSSHHSGDKRKREPSPPSEDFGDSKYSEEEFSSESEGGNRRVMLGHIGALEVAAELCWATSAL

SEQ ID NO: 80257 - protein, 114 aa, Zea mays
  Coding DNA Sequence Number=SeqID_38478
MGKSKKGRSSSHHSGDKRKREPSPPSEDFSDSDSDDSQGITTEVWTYIRAIERSGLKGSDESEISSNEEDSSDSSEEGSGGDGDDDGDGGDKGDDGTGKDDGGSGKASGKAPLG

SEQ ID NO: 80258 - protein, 142 aa, Zea mays
  Coding DNA Sequence Number=SeqID_38479
  Homolog annotation: Hit_ID=Q6QP54; Match level="QueryCoverage=71%, HitCoverage=37%, E-value=2e-08, Identity=49%"; Hit description =Putative kinase
  Subcellular localization annotation: CTP_CleavageSite=15; ConfidenceScore=5.01e-01
MISASPDPRARTRPRLGRRSPPRPTLGLGLDLDSGRRSPPRPTPGLGRDLDLGGVTTSLGPTTPQGEAIITLPLASPGYGEQDRRPIWLAPVKQVMMAPRVLHDNGGYQPPTEARIRQQGSDSPDSCASIELKHSSDGHDAA

SEQ ID NO: 80259 - protein, 252 aa, Zea mays
  Coding DNA Sequence Number=SeqID_38480
  Subcellular localization annotation: CTP_CleavageSite=44; ConfidenceScore=5.33e-01
MASPCGVVGPSEVVTPPRSRSRPRPGVGRGGDLLPESRSSPSPRVGRGGDRLPRRGRVRALGSGEAEIIVRVEVESEPWGRSVEGRSDCGHFGLVDWKARVRIRCQAILALNAPAIRSAGEAIWPRLLLREAYSSWASGESKVRPLLEETLGRGANLPWSSVPARGWARARRDRVPRVGGALTGIAPIRPLQLCADGGYQLRLGALGVIRVDAHAPFDKGRLVAQRRAPKVPAGDLPDLVPFDRVRGLDASL

SEQ ID NO: 80260 - protein, 65 aa, Zea mays
  Coding DNA Sequence Number=SeqID_38481
MAGGGELTGAKGGVSGQRGLVGFANWIKRYGGVKLGLSHCRTLREDLGFDVSRARVPTPSSGMIL

SEQ ID NO: 80261 - protein, 62 aa, Zea mays
  Coding DNA Sequence Number=SeqID_38482
MAGGGELTGAKGGVSGQRGLVGFADWIKRYGGVKLGLSHCRTLREDPGFDVSRARVPMPSSA

SEQ ID NO: 80262 - protein, 305 aa, Zea mays
  Coding DNA Sequence Number=SeqID_38483
VDPRAIDLAMRITERMFLKIKEDEAKNKIEEENDRWRPNDESTSSQGSSFKSTSHMCFVANGSDSESESEDEEEPKSDSEDEGALQQFFAQLSKKNRMSLLKLMKRAEEQKEMLHKQEDFLIRKIEDLEKLTKEHEKLKCSHDDLVQRAAHRASPRHNAGEQADQHTGVQPQNRASLREKGNKANTLVGPLPVITAWRHPAMARCGIAVAEQLRREIATYPSEPPRPPASAESTAPVRSQVSGGGIALSPERAERWRPRLCSEENEGETAWPNTVLCARVRLGGRSDASCARNRVWFNGPARIQG

SEQ ID NO: 80263 - protein, 136 aa, Zea mays
  Coding DNA Sequence Number=SeqID_38484
MARCGIAVAEQLRREIATYPSEPPRPPASAESTAPVRSQVSGGGIALSPERAERWRPRLCSEENEGETAWPNTVLCARVRLGGRSDASCARNRVWFNGPARIQGRSTNELPRMRRILLRQRRARGSLLHWIKLGAR

SEQ ID NO: 80264 - protein, 193 aa, Zea mays
  Coding DNA Sequence Number=SeqID_38485
MAIPREQRRTSPELPPVTPGALSADPTRALGRGVYGERDRGTANYGSESPQREGAGSNIAADADSRGSTNELPRMRGILLTLRRARGRAAGLVDGYESNETGGIGYVTYHVGQVVGYGRVDLSHQFRHVIVDITPQLITLNQRSKSDKYHKNKTFKFIDVYKNSFIFVPKSRSPIPKSHFNHRISKCEIQVCL

SEQ ID NO: 80265 - protein, 103 aa, Zea mays
  Coding DNA Sequence Number=SeqID_38486
MDLRRSVGEDRAEVRGPHSKDVRVRACAVGHWQAGPRDVIVDITPQLITLNQRSKSDKYHKNKTFKFIDIYKNSFIFVPKSRSPIPKSHFNHKISKCEIQVCL

SEQ ID NO: 80266 - protein, 88 aa, Zea mays
  Coding DNA Sequence Number=SeqID_38487
  Subcellular localization annotation: CTP_CleavageSite=18; ConfidenceScore=5.38e-01
MRSPIPKVTLSTGFQSVKSTFVFRTKRFRPTVNIPLIPLLSHPGFRGPKPGREHNHQVGAHVKCKAYQRGWLKLSIAFKVGQNFISNY

SEQ ID NO: 80267 - protein, 802 aa, Zea mays
  Coding DNA Sequence Number=SeqID_38488
  Gene Ontology: Mol. function=protein serine/threonine kinase activity; Cellular component=intracellular; Biological process =protein amino acid phosphorylation
  Homolog annotation: Hit_ID=Q2QYQ4; Match level="QueryCoverage=90%, HitCoverage=83%, E-value=0.0, Identity=66%"; Hit description =Pentatricopeptide, putative
  Pfam annotation: Domain name=PPR; Domain location=118-152; Score =28.8; E_value=1.9e-05; Accession=PF01535.11; Description=PPR repeat
  Pfam annotation: Domain name=PPR; Domain location=223-257; Score =22.2; E_value=0.0019; Accession=PF01535.11; Description=PPR repeat
  Pfam annotation: Domain name=PPR; Domain location=294-328; Score=7.4; E_value=0.98; Accession=PF01535.11; Description=PPR repeat
  Pfam annotation: Domain name=PPR; Domain location=419-453; Score =32.6; E_value=1.3e-06; Accession=PF01535.11; Description=PPR repeat
  Pfam annotation: Domain name=PPR; Domain location=521-555; Score =18.3; E_value=0.028; Accession=PF01535.11; Description=PPR repeat
  Pfam annotation: Domain name=PPR; Domain location=623-657; Score =29.7; E_value=1.1e-05; Accession=PF01535.11; Description=PPR repeat
  Pfam annotation: Domain name=PPR; Domain location=659-692; Score=7.8; E_value=0.9; Accession=PF01535.11; Description=PPR repeat
  Pfam annotation: Domain name=PPR; Domain location=695-729; Score=2.0; E_value=4.3; Accession=PF01535.11; Description=PPR repeat
  Pfam annotation: Domain name=PPR; Domain location=761-795; Score=2.4; E_value=3.8; Accession=PF01535.11; Description=PPR repeat
  Pfam module annotation: Pfam domain module=PPR::PPR::PPR::PPR::PPR::PP R::PPR::PPR::PPR; Domain location=118-152::223-257::294-328::419 -453::521-555::623-657::659-692::695-729::761-795
  Subcellular localization annotation: CTP_CleavageSite=37; ConfidenceScore=5.65e-01
MKTRSASRAGAWMPPHQLAISSAATRPSSTLSAAVARCSRAAAITDPFAIADALSAASSAPASQSLSTGSQLHASGIKLGVVFADTYTSNQLLIHYSKRGQLASALDVFDETPSRNHVTWTAIVSAAARGGAPGLGLRLFASMLRSGFCPNEFALASALGACCQWVAADVKLGLSLHGLAVRAVLHGNPYVGSSLMLVYAKHGRVAAAERVFAGIASGSRDVACWNAMLEGYVANGHGYDATRTVALMHGSGIAPDMFTYISAAKASWIARDLYFGRQVHGLVVRSVLESNNTSVMNALMDMYFKAGQKETAADIFGKIRWKDTVSWNTMISGLEDERAAADCFVDMARCGCRSNQVTFSVMLRLSGASLGLQIFGLAYRHGYSDNVLVANAAINMLSRCGLLSCAYGYFCDLGVRNVVTWNEMIAGYGLHGCSGDAMRLFRSLVCFGARPDEFTYPAVLSAFQQDHDARNHEQVHASVLKQGFASCQFVSTSLIKAKAALGSSVLGPLKIIQDAGEMDLVSWGVAISAFVKHGLGQEALSLFNSCRVDCPEKPDEFILGTILNACANAALIRQCRCIHSLVVRTGHSKHLCVSSALVDAYAKCGDITAAKGAFATVSTKDAIVYNTMLTAYANHGLIREVLSLYQEMTQLQLAAPTPATFVAAISACSHLGLVEQGKLLFSSMLSAHGMNPTRANYACLIDLLARRGLLEEATGVIQAMPFQPWPAVWRSLMNGCRIHGNKELGLLASEQILRMAPNSDGAYVSLSHVYAEDGDWRSAEDARRKMAENQVHKAQGYSSLQI

SEQ ID NO: 80268 - protein, 104 aa, Zea mays
  Coding DNA Sequence Number=SeqID_38489
MAPAIGAEAEAAREVPVTDGITATIRASGLRRGLGSGWRPWKMVGRGPRGNRPSRLLGPDSRRSPWTASPSEAGSDLAEGVVDAEGATAPFQREDPSLQDQIVL

SEQ ID NO: 80269 - protein, 299 aa, Zea mays
  Coding DNA Sequence Number=SeqID_38490
  Subcellular localization annotation: CTP_CleavageSite=5; ConfidenceScore=5.38e-01
MSSRSLMHRVSPPSKPPDGGYPPSFRLIVGGTQLRGSWYLSAIVRLQGFSSASPAVPPHRRSPKTVTTSSWVGRSKPGCDLGPTLSFKDVHHPRWGGGRDEPALYLPRGFVGHPLPRRSRERALTGPAGGPDFDNAGLVDGGRHHLQRVGLVGLAPGGPSCWRAAAAPCAREDHPRCRALLGRRSCSGVVLPLHRDGALARRPAEAAREVPVTDGITTTIRASGLRRGLGSGWRPWKMVGRGPRGDRPSRLLGPDSRRSPWTASPSEAGSDLAGGVVDAEGATAPFQREDPSLQDQSVL

SEQ ID NO: 80270 - protein, 194 aa, Zea mays
  Coding DNA Sequence Number=SeqID_38491
MDVAPELRAHLSIQSTRRSQNPVVVVFILLLWLASGPCFKLDENPICALNGCAQWVDMYIVLSREQLLEVTGRNDVPEWLIYRIQKNPDGGKGRRQGPKESQGQEKRAYLHDLEHVGLDDSEQDDGYDNDDEGDIVDKDGRDGGKGDNDSGKGGSGGGESDNSSDGDDGRAKGVSGGAKGGSGDGDAGGEVPPT

SEQ ID NO: 80271 - protein, 187 aa, Zea mays
  Coding DNA Sequence Number=SeqID_38492
MRLGVPFIAPRQLGAVESNSGRLILPSVIGRTGQSENPICALNGCAQWVDMYIVLSREQLLEVTGRNDVPEWLIYRIQKNPDGGKGRRQGPKESQGQEKRAYLHDLEHVGLDDSEQDDGYDNDDEGDIVDKDGRDGGKGDNDSGKGGSGGGESDNSSDGDDGRAKGVSGGAKGGSGDGDAGGEVPPT

SEQ ID NO: 80272 - protein, 40 aa, Zea mays
  Coding DNA Sequence Number=SeqID_38493
MEYIVFLGHVAALEPSTLWGQVCGIYYRLCHLRHNWPGHH

SEQ ID NO: 80273 - protein, 313 aa, Zea mays
  Coding DNA Sequence Number=SeqID_38494
MEYIVFLGHVAALEPSTLWGQGTDSGLRARLRGGYEPAGGAKAGLQIGPSPRARGWGVAFGGDEEAHYRGRWRAPHAAVCLLRTRRPTPKEYDAWVWAPVPEAGQLLSAEVKRRTTADGGVLLTQRGDEEAHYRGRWRAPHVAVCLLRTRRPTPKEYDAWAWAPVPEAGPLLSAETKRRIIAGGGVLLTRWFAFIAHGDRRPRSMTRGPGPPRQRLGHPGVRRARSSAASRGPPWPLLDPPERFQPKVALNLVCNLLGWGVPTFAGRICVGASPHGDLTAEEFVLFVSNLPSGLALPISSFFVLLLEELGLQS

SEQ ID NO: 80274 - protein, 122 aa, Zea mays
  Coding DNA Sequence Number=SeqID_38495
MGPMGVLLTLPSRSCVQVQVPAEAASWGPLPTLLGSRWKRAAAISMAYDVLYDLLGSVFSSRASGHRWRQHRSHQSQRDGGAKVGAAAQPAVHLHKAGEHPFLRMLEEEAGRSVAPTDTLQR

SEQ ID NO: 80275 - protein, 122 aa, Zea mays
  Coding DNA Sequence Number=SeqID_38496
MTLLDPPECFQSEVALDLVRNLLGWGAPTFAGRIRVGTSPHGDLAAGEFVLFVSNLPSGLALPISSFFVLLLEGLSLQPQHFTPCFILQAAIIAYLCKMSMGATLLPASSSSIRRKGCSPAL

SEQ ID NO: 80276 - protein, 137 aa, Zea mays
  Coding DNA Sequence Number=SeqID_38497
  Subcellular localization annotation: CTP_CleavageSite=33; ConfidenceScore=5.07e-01
MTAAGHGVARPTAENRSATSDCSSLGGVRPKSRAQTASPGEGDTPRLDFESRDPPTTAILGGGALRCFSLGDDYAISHLGVRLAKAMAQGHGVLGADASVVSRGWGESELKNREDPQRPDLHGDGRAARVIGLTVVG

SEQ ID NO: 80277 - protein, 138 aa, Zea mays
  Coding DNA Sequence Number=SeqID_38498
  Subcellular localization annotation: CTP_CleavageSite=33; ConfidenceScore=5.07e-01
MTAAGHGVARPTAENRSATSDCSSLGGVRPKSRAQTASPGEGDTPRLDFESRDPPTTAILGGGALRCFSLGDDYAISHLGVRLAKAMAQGHGVLGADASVVSRGWGESELKNREDPQRPDLHGDGRATRVIGLTVVGR

SEQ ID NO: 80278 - protein, 137 aa, Zea mays
  Coding DNA Sequence Number=SeqID_38499
  Subcellular localization annotation: CTP_CleavageSite=33; ConfidenceScore=5.07e-01
MTAAGHGVARPTAENRSATSDCSSLGGVRPKSRAQTASPGEGDTPRLDFESRDPPTTAILGGGALRCFSLGDDYAISHLGVRLAKAMAQGHGVLGADASVVSRGWGESELKNREDPQRPDLHGDGRATRVIGLTVVG

SEQ ID NO: 80279 - protein, 381 aa, Zea mays
  Coding DNA Sequence Number=SeqID_38500
  Gene Ontology: Mol. function=metalloendopeptidase activity; Cellular component=membrane; Biological process=proteolysis
  Homolog annotation: Hit_ID=Q94DI2; Match level="QueryCoverage=50%, HitCoverage=62%, E-value=2e-64, Identity=66%"; Hit description =Peptidase M48-like
  Pfam annotation: Domain name=Peptidase_M48; Domain location=157-316; Score=18.4; E_value=5.1e-06; Accession=PF01435.8; Description =Peptidase family M48
  Pfam annotation: Domain name=Peptidase_M56; Domain location=189-280; Score=-32.4; E_value=0.025; Accession=PF05569.2; Description=BlaR1 peptidase M56
  Pfam module annotation: Pfam domain module=Peptidase_M48::Peptidase _M56; Domain location=157-316::189-280
  Subcellular localization annotation: CTP_CleavageSite=33; ConfidenceScore=5.07e-01
MTAAGHGVARPTAENRSATSDCSSLGGVRPKSRAQTASPGEGDTPRLDFESRDPPTTAILGGGALRCFSLGDDYAISHLGVRLAKAMAQGHGVLGADASVVSRGWGESELKNREDPQRPDLHGDGRATRVIGLTVVGSGRYMNGRTQDDHYQDLKGLDPTVMLLNTEAPDLYIRQNPVPNAYTLAINDKKPFIVVHTSLVELLTPRELQAVLAHELGHLKCDHGVWLTFANILTMGAYTVPGFGMVAGFLEEQLYRWLRAAELTCDRAALLVVQDPKVVISVLMKLSRGYSFFRFSCSHGMVAAFARAAWLKEYHEKVSMTLNILAYLSPLLTWDTKQVFVFVAAECETPQDAFIQEKSLGLLTQNFVKLFFTMKVETISL

SEQ ID NO: 80280 - protein, 253 aa, Zea mays
  Coding DNA Sequence Number=SeqID_38501
  Gene Ontology: Mol. function=metalloendopeptidase activity; Cellular component=membrane; Biological process=proteolysis
  Homolog annotation: Hit_ID=Q94DI2; Match level="QueryCoverage=52%, HitCoverage=40%, E-value=1e-62, Identity=90%"; Hit description =Peptidase M48-like
  Pfam annotation: Domain name=Peptidase_M48; Domain location=29-188; Score=18.4; E_value=5.1e-06; Accession=PF01435.8; Description =Peptidase family M48
  Pfam annotation: Domain name=Peptidase_M56; Domain location=61-152; Score=-32.4; E_value=0.025; Accession=PF05569.2; Description=BlaR1 peptidase M56
  Pfam module annotation: Pfam domain module=Peptidase_M48::Peptidase _M56; Domain location=29-188::61-152
MESLVRTRACGRYMNGRTQDDHYQDLKGLDPTVMLLNTEAPDLYIRQNPVPNAYTLAINDKKPFIVVHTSLVELLTPRELQAVLAHELGHLKCDHGVWLTFANILTMGAYTVPGFGMVAGFLEEQLYRWLRAAELTCDRAALLVVQDPKVVISVLMKLSRGYSFFRFSCSHGMVAAFARAAWLKEYHEKVSMTLNILAYLSPLLTWDTKQVFVFVAAECETPQDAFIQEKSLGLLTQNFVKLFFTMKVETISL

SEQ ID NO: 80281 - protein, 182 aa, Zea mays
  Coding DNA Sequence Number=SeqID_38502
  Pfam annotation: Domain name=IQ; Domain location=48-68; Score=20.5; E_ value=0.0059; Accession=PF00612.17; Description=IQ calmodulin-binding motif
MGDLWSNIRADLAKMQATLQKVEQGLLQIKAALQHEQHQLALSARLRTSTVVGIQAAARGFLARQRVREMHRQMLEAALVTVDLGTRGRDLTLLDGHQHWHRAAISKCEHVHCWRVLLHTTIKLRILIIINADDEGDGSVTPSVGGEILETTIVTWQVRICFTDEKIATSSQKPIGPKHRNP

SEQ ID NO: 80282 - protein, 533 aa, Zea mays
  Coding DNA Sequence Number=SeqID_38503
  Gene Ontology: Mol. function=electron carrier activity; Cellular component=endoplasmic reticulum; Biological process=electron transport
  Homolog annotation: Hit_ID=Q653S9; Match level="QueryCoverage=74%, HitCoverage=67%, E-value=1e-152, Identity=61%"; Hit description =Putative NADPH-cytochrome P450 oxydoreductase isoform 3
  Pfam annotation: Domain name=FAD_binding_1; Domain location=195-386; Score=126.9; E_value=5.7e-35; Accession=PF00667.10; Description=FAD binding domain
  Pfam annotation: Domain name=NAD_binding_1; Domain location=397-499; Score=107.2; E_value=4.9e-29; Accession=PF00175.11; Description =Oxidoreductase NAD-binding domain
  Pfam module annotation: Pfam domain module=FAD_binding_1::NAD_binding_ 1; Domain location=195-386::397-499
MQATLQKVEQGLLQIKAAVQHEQHQLALSARLRTSAAMLEAALVTVDLGTRRRDLTLSDGHQQWHQAAISKCEHDTCPAGDELQLYDSGGREDTHLVINKGALFSATTFRYRPPRGRLRWLLLRPIPGIEKRASFPLVCVGAPREDSHTRTKLLVGKELLWPELDKLLRQEDDSSTAPTPYTAAIPEYRVVFVKPEDDIANVAVRRELHTPASDRSCIHLEFDIAGTGLKLLISPLYLYRYETGDHVGVYAENCIETVEEAEKLLGYSPDTLFSIYADQEDGTPLCGGSLPPPFPSPCTVRTALTRYADLLNSPKKSALLALAAHASDSKEAERLRHLASPAGKKDYLSSPAAKILLNIFLTEHSTPLEDSKDCSWAPIFVRQSNFKLPADPTVPIIMIGPGTGLAPFRGFLQERLALKQAEVELGHAVLFFGCRNRKMDFIYEDELNNFVDAGALSELIVAFSREGPTKEYVQHKMAQKGGYIYVCGDAKGMARDVHRTLHTIVQEQGSMDNNSKAESYVKSLQMEGRYLRD

SEQ ID NO: 80283 - protein, 116 aa, Zea mays
  Coding DNA Sequence Number=SeqID_38504
MKAKSHLQPYQGGTCKNYATSKAEYTNTLLDLPVTALVPTITGMGDYVLGRVRRAICGQVHSGIRTLILIPISSHRQCIPMDPCPQTIIIPLSKWIQPIPDLARVLEKSLDFYRDP

SEQ ID NO: 80284 - protein, 77 aa, Zea mays
  Coding DNA Sequence Number=SeqID_38505
MKAKSHQQPLIQRSTMDEGVSLAARSRRFESSFNLARQRIPMDPCPQTIIISLSKWIQPIPDLARVLEKSLDFYRDP

SEQ ID NO: 80285 - protein, 65 aa, Zea mays
  Coding DNA Sequence Number=SeqID_38506
MKNQWEKTKRHVQKLSREIRSPPELLSNPLFKQLAPTKELGFLFDVQGCSWHGKSSNNRSRCNYR

SEQ ID NO: 80286 - protein, 109 aa, Zea mays
  Coding DNA Sequence Number=SeqID_38507
MGKPGPSLLMLLLCRVTAVVPTITGMGDHISGHVRGKVCGQVTQDEESMGETKRHVQKLSREIRSPPELLSNPLFKQLAPTKELGFLFDVQGCSWHGKSSNNRSRCNYR

SEQ ID NO: 80287 - protein, 540 aa, Zea mays
  Coding DNA Sequence Number=SeqID_38508
  Gene Ontology: Mol. function=nucleoside-triphosphatase activity; Cellular component=integral to membrane; Biological process=defense response
  Homolog annotation: Hit_ID=O24367; Match level="QueryCoverage=53%, HitCoverage=20%, E-value=1e-133, Identity=80%"; Hit description =Pleiotropic drug resistance protein TUR2
  Pfam annotation: Domain name=ABC_tran; Domain location=123-312; Score= -27.0; E_value=4.2e-05; Accession=PF00005.17; Description=ABC transporter
MRKGILTGAAAGVEEVDIQGLGMQERKNLIERLVRTAEEDNERFLLKLRDRMERVGIDNPTVEVRFENLNIDAEAYVGNRGVPAMTNFFSNKVMDVLSAMHIVSSGKRHVSILHDISGVIRPGRMSLLLGPPGSRKTSLLLALAGKLDSNLKVSGRVTYNGHDMDEFVPQRTSAYIGQHDVHVGEMTVRETLAFFARCQGVRTRYDMLTELSRREKEANIKPDPDVDVYMKAISVEGQESVVTDYILKILGLEICADTMVGDSMIRGISGGQKKHVTTGEMLVGPAKALFYSITTIDGAQKLNRAELEVACEDFSNINTFRTCIVFKGILSGGVEIGIVSTVISSSKDWSRSAETCFKKKCLFLFDYFDSRTVILVRLLRFWDYQNTDRGYTVYFDSRTAKCLYCLKAVFILVYYLPDVSVCLIMQVDYSAYVHNSSSLHMTASFFSLLDSFHFCPLGYKDFPDLGNTTSSLLSTCCHVVLELWRVELMKQDKRAKVLCLHGFCTSESFLKSRSTTGTLPLVMDMGIAMRPHELFENIYV

SEQ ID NO: 80288 - protein, 234 aa, Zea mays
  Coding DNA Sequence Number=SeqID_38509
  Homolog annotation: Hit_ID=Q2QNM4; Match level="QueryCoverage=40%, HitCoverage=79%, E-value=2e-35, Identity=71%"; Hit description=DNA -directed RNA polymerase II 14.5 kDa polypeptide, putative, expressed
  Pfam annotation: Domain name=TFIIS_C; Domain location=194-233; Score =14.2; E_value=0.0027; Accession=PF01096.9; Description=Transcription factor S-II (TFIIS)
  Subcellular localization annotation: CTP_CleavageSite=30; ConfidenceScore=5.46e-01
MAWAWSRAVAGARGFAHGRALSAPPGVSPRRTRGSSLLPWFNGRFEHLSVRILAKSLCTVSSLLHILPFCSYVHNSSSLHMTTSFFSLLDSFHFCPLGYKDFPDLGNTTSSLLSTCVMWCSSYGLNQQISKWILSVSAIVFYSCLRLEKISELLCEVSDNNCVYRNEVHHTAGERTEVLQDVASDPTLPRTKTVRCNLCGHGEAVFFQAATRGEEGMTLFFVCCSPDCGHRWRE

SEQ ID NO: 80289 - protein, 436 aa, Zea mays
  Coding DNA Sequence Number=SeqID_38510
TGAPVARRVGLGSRLACQESEKRVHLARLHAACMAARPFCPLVWAKMGGRLGGPWSVLEKTRPAVLGGARRGVAFKRREAPFVRQPCLLPPLSVGSSRLPSPRMGGIRRLSASSLEERNSMGVGTSQPSFGFKDFHHAAWPYPATGGHPRWPRWKTRRVGGPPPRGSAAPFFPLRPGVKGVLEPHGDFLQPCQDMQGARGPGSPSPCLNGWFSSSAGGGEPFCRDTSPKAAAYAASLSGAGEVAVAVGTGGSEPPIVLQLLRRPSPSEGGSGPTPKSISQGLGSGWRPWEPVDRGPRGNRLSRLLGPDSRRSPWTAAAPEAGSGFAEDVVDAEGATAPFGVKTRACRIRSSCSVCFLRPPRPEDNTLAALAKLRLFSSCFEHLDFVGNRDVCVSKSCFSRKGRVRYPYPRGVGIPRLGRPCRLRVLSPVHEALSPT

SEQ ID NO: 80290 - protein, 453 aa, Zea mays
  Coding DNA Sequence Number=SeqID_38511
MGGSEPGSFAEKDPFRATGAPVARRVGLGSRLACQESEKRVHLARLHAACMAARPFCPLVWAKMGGRLGGPWSVLEKTRPAVLGGARRGVAFKRREAPFVRQPCLLPPLSVGSSRLPSPRMGGIRRLSASSLEERNSMGVGTSQPSFGFKDFHHAAWPYPATGGHPRWPRWKTRRVGGPPPRGSAAPFFPLRPGVKGVLEPHGDFLQPCQDMQGARGPGSPSPCLNGWFSSSAGGGEPFCRDTSPKAAAYAASLSGAGEVAVAVGTGGSEPPIVLQLLRRPSPSEGGSGPTPKSISQGLGSGWRPWEPVDRGPRGNRLSRLLGPDSRRSPWTAAAPEAGSGFAEDVVDAEGATAPFGVKTRACRIRSSCSVCFLRPPRPEDNTLAALAKLRLFSSCFEHLDFVGNRDVCVSKSCFSRKGRVRYPYPRGVGIPRLGRPCRLRVLSPVHEALSPT

SEQ ID NO: 80291 - protein, 236 aa, Zea mays
  Coding DNA Sequence Number=SeqID_38512
MHQRVPSNSYEPNAHFTRLKVCEKLVHQLDHAEQSTLGVDLTQALRISWLINERAAGAELRNNGEVAVKPGEEHATSTKGDSPAQGRAARDSRAGAGNVGSGGELDCWPVTHDTASTSTEKGKAQGRAVSRRGPGKNNACAGAWQGHGRELRRRPWRGSELWSRNGSATPGSFTAPELEEEGERVGWALAKGEGAPAGWKLEAGWGREERPALEKMGAEQGTCVQHMEEAEGAEAG

SEQ ID NO: 80292 - protein, 103 aa, Zea mays
  Coding DNA Sequence Number=SeqID_38513
MGSRAARAGAWQGHGRELRRRPWRGSELWSRNGSATPGSFTAPELEEEEERVSWALAKGEGAPAGWKLEAGWGREERPALEKMGAEQGTCVQDMEEAEGAEAG

SEQ ID NO: 80293 - protein, 139 aa, Zea mays
  Coding DNA Sequence Number=SeqID_38514
MCICHYVAHLLSTTVAALLTAMTTRRVLAPHRQLLRLMRAQPPGPGEGVLHPVLEPNLAGGGGERRAVTFVGRSCHQLRSPSKRREPRPTSRRCGEVRPGAQRYRRSPPSWASRCYHRTRNKAHIVQSFQDPQQNKDAA

SEQ ID NO: 80294 - protein, 59 aa, Zea mays
  Coding DNA Sequence Number=SeqID_38515
MVNDAQSQSWGGAATSSKVRRRGESLVRPRDGAVRFWILKEEASPKGGSRVIGARIGDA

SEQ ID NO: 80295 - protein, 93 aa, Zea mays
  Coding DNA Sequence Number=SeqID_38516
MEAKSHHQPIILRSTCKNCATSKAEYTNTQLDLPVTALVPTITGMGDHVSGRVRDKVHCQIVFAGGGTRLASIYWTTKKSDPRLFGKLRKIPT

SEQ ID NO: 80296 - protein, 101 aa, Zea mays
  Coding DNA Sequence Number=SeqID_38517
MEAKSHHQPIILRSTCKNCATSKAEYTNTQLDLPVTALVPTITGMGDHVSGRVRGKVCGQTTIIMISKWIQPIPDLVRVLEKSLDFYRDPYLIKQLLDLAY

SEQ ID NO: 80297 - protein, 643 aa, Zea mays
  Coding DNA Sequence Number=SeqID_38518
  Homolog annotation: Hit_ID=Q6QP51; Match level="QueryCoverage=33%, HitCoverage=97%, E-value=1e-20, Identity=46%"; Hit description =Putative growth-regulating factor 1
  Subcellular localization annotation: CTP_CleavageSite=21; ConfidenceScore=5.06e-01
MMTASKKPPQSTRAPRPLLIRGSKAGPSEGFDSLLRALGLRAHYWSEVRRLAPRKGSTAASGHSGSAPTTDQGFEGWPPEGFDSRLRTRRARDDSGYVRYMDEARATLPRYPRTFPRPAGGTIIRGTPKLLNSAGNHHQHKLQRPDGRNTGQSSVHSRDTISPRLSPASGRNSRPMWIHASPEDLLKQRAHLRLARGPARAGFAVKQPWPDRLANRPYRMSIQCKDRPTPYPDARSSVGRAEPSPASGAIGSSASHDPRARPPPRPRKTISASPDPRARTPPRPQKTVSTSPDPRARTQPRPRKTVSASPDPRARTQPRPRRSHRLARSLARTDHVTGGHIITLPLASSGYGEQDRRPIWLAPGSSAPPTATTSHEQGTNTSPTAMPAWPSYERVAAWEDGLTSRLSPSLANAWRSRGDAATRDGTAGQDGDAPARAATSVAAAYRLFGSCTPACNYMHGVLEQSMFGSDLCPYRFVTHAKSVVRPELTGRHLSASFGGAGSGEEANGHSSFHASFHQQQHPIIVQHGHKKLKRLDYKWTEEPAALVHHLRIPLLAAHFSSAMKLVLCFCICVVLVIASSPVPLSDSRPAMGRRWLRDEVVIAKGPEGNTTSASASAWSEEAPGIPYDGSKRLSPGGPNPQHH

SEQ ID NO: 80298 - protein, 80 aa, Zea mays
  Coding DNA Sequence Number=SeqID_38519
MSRLMGLLEATKITLDNKEELVVDLSSEMMEKDLQEIQDMEADEDVDIKGGVEPEPTSSLDTAGSGRPPSPESCVASFAH

SEQ ID NO: 80299 - protein, 169 aa, Zea mays
  Coding DNA Sequence Number=SeqID_38520
MWKDRVEHAKDVWALYPGQTAHLTVRCMNALYRLQAVRGEAMSQLMGLLEATKITLDNREELVVDLSTEMVEKDLQVEQMATQIQELEELVGARENTIEVLEDQLINTQLQLEEANHHLDMHHQEIQDMEADEDVDIEGGVEPEPTSSLDTAGSGRPPSPESSVASFAH

SEQ ID NO: 80300 - protein, 988 aa, Zea mays
  Coding DNA Sequence Number=SeqID_38521
  Gene Ontology: Mol. function=catalytic activity; Cellular component =alpha,alpha-trehalose-phosphate synthase complex (UDP-forming); Biological process=trehalose biosynthetic process
  Homolog annotation: Hit_ID=Q6ERD9; Match level="QueryCoverage=87%, HitCoverage=97%, E-value=0.0, Identity=83%"; Hit description =Putative trehalose-6-phosphate synthase/phosphatase
  Pfam annotation: Domain name=Glyco_transf_20; Domain location=61-559; Score=852.2; E_value=2.7e-253; Accession=PF00982.11; Description =Glycosyltransferase family 20
  Pfam annotation: Domain name=Hydrolase_3; Domain location=607-831; Score=-88.1; E_value=0.052; Accession=PF08282.2; Description =haloacid dehalogenase-like hydrolase
  Pfam annotation: Domain name=Trehalose_PPase; Domain location=608 -850; Score=325.7; E_value=8.3e-95; Accession=PF02358.7; Description =Trehalose-phosphatase
  Pfam module annotation: Pfam domain module=Glyco_transf_20::Hydrolase_ 3::Trehalose_PPase; Domain location=61-559::607-831::608-850
MVSRSYSNLLELAAGGSGGEPLPSLGRRRIPRVVTASGIVPDLDVSDAASAADQSSHAPRERVIIVANQLPVRASRRAAAGAGGGGWDFAWDQDSLLLQVKDSLRAHHGRADVEFVYVGGLRDDVPPAEHDQVAHDLLEGFRCVPTFLPADLRSRFYHGFCKQQLWPLFHYMLPLSPELGGRFDRLLWQAYVSVNKIFADKILEVISPDEDFVWVHDYHLMVLPTFLRKRFNRVKLGFFLHSPFPSSEIYKTLPVREELLRSLLNADLIGFHTFDYARHFLSCCSRMLGLKYESQRGYIALEYYGRTVTIKILPVGVHLEQLRSVLNLPELGVKVAELLKQFCHRNRLLLLGVDDMDIFKGISLKLLAFEQLLMQHPEWRGRVVLVQIANPARGRGKDVREVQEESDAMVRRINDAFGQPGYQPVILIDQPLQFYERMAYYVVAECCLVTAVRDGMNLIPYEYVIARQGNERIDSILGLGPASRKKSMLVVSEFIGCSPSLSGAIRVNPWNIDSVADAMDYALEMPEGEKVLRHEKHHRYVSTHDVGYWANSFLQDLERICLDHNRRRCWGIGFGLKFRVVALDPNFKKLAVEHLVLAYRRTKKRVILLDYDGTLMPQTSLGKSPTSRTIDMLNSLCRDRNNMVFLVSAKSRMTLNEWFLPCESLGLAAEHGCFLRLRRDAEWETCVPVIDCSWKQIAEPVMKTYTETTDGSTIEDKETAIVWCYEDADPDFGSCQAKELHDHLESVLANEPVSVKAGPNLVEVKPQGVSKGLVAKRILSTTQERGDADDDLPDFVLCVGDDRSDEDMFEVIAAAAAARGVSSLQAEAEVFACTVGRKPSKAKYYLDDPADIVRLVQGLASVSDDDQTHAPPPPPPSAATTAADTVPRVRVCWIQSSSETLLAAVVNNAQSQSWGGDATSSEVRRRGESLIRPRDGAMRLDPEHRAAFPFRSVDQALSISYPRASAAHLRNDWVSMADFCAGGADSAV

SEQ ID NO: 80301 - protein, 80 aa, Zea mays
  Coding DNA Sequence Number=SeqID_38522
  Gene Ontology: Mol. function=3-deoxy-7-phosphoheptulonate synthase activity; Biological process=aromatic amino acid family biosynthetic process
  Homolog annotation: Hit_ID=Q75W16; Match level="QueryCoverage=51%, HitCoverage=7%, E-value=4e-12, Identity=88%"; Hit description =Phospho-2-dehydro-3-deoxyheptonate aldolase 2, chloroplast precursor
MGIVHKTKNVKYYCRVKLKPQDGLFEGFRISITLMFSASIHVIMVILPGLFEGFRISISFTKSLGFILSLTYIPPYSLPI

SEQ ID NO: 80302 - protein, 213 aa, Zea mays
  Coding DNA Sequence Number=SeqID_38523
  Homolog annotation: Hit_ID=Q75W16; Match level="QueryCoverage=17%, HitCoverage=7%, E-value=6e-11, Identity=92%"; Hit description =Phospho-2-dehydro-3-deoxyheptonate aldolase 2, chloroplast precursor
  Pfam annotation: Domain name=LRR_1; Domain location=58-80; Score=8.5; E_value=7.3; Accession=PF00560.23; Description=Leucine Rich Repeat
  Pfam annotation: Domain name=LRR_1; Domain location=82-103; Score =10.8; E_value=2.7; Accession=PF00560.23; Description=Leucine Rich Repeat
  Pfam module annotation: Pfam domain module=LRR_1::LRR_1; Domain location=58-80::82-103
VSDKMNPSDLVKLIEILNPSNKPGRITIITWMEAENMRYSDLSNNNLNGDLPYQLPPNVVELNLGKNHLSGQLTDMFSQLPKLSTLNVESNQFSGHIDVLAKLPLEDLRPQPVVHGSATILPTAAARQRFPRIPPARGAPFHPRIKQSRLPSMALLSILDRGFLATALRLSRPFRITAPRPLSRFLFSQDPIPDVSRSAAVDPFPKAFYSPDP

SEQ ID NO: 80303 - protein, 731 aa, Zea mays
  Coding DNA Sequence Number=SeqID_38524
  Homolog annotation: Hit_ID=Q2QV45; Match level="QueryCoverage=47%, HitCoverage=50%, E-value=1e-163, Identity=86%"; Hit description =Stromal 70 kDa heat shock-related protein, chloroplast, putative, expressed
  Pfam annotation: Domain name=HSP70; Domain location=1-350; Score =393.6; E_value=2.9e-115; Accession=PF00012.10; Description=Hsp70 protein
DKQALQRLTEAAEKAKMELSTLTQANISLPFITATADGPKHIEATLSRAKFEELCSDLIDRLKTPVNNALRDAKLSLSDLDEVILVGGSTRIPAVQELVRKLTDKDPNVTVNPDEVVSLGAAVQGGVLAGDVKDVVLLDVTPLSLGLETLGGVMTKIIPRNTTLPTSKSEVFSTAADGQTSVEINVLQGEREFVRDNKSLGSFRLDGIPPAPRGVPQIEVKFDIDANGILSVAAIDKGTGKKQDITITGASTLPKDEVERMVEEADKFAKEDKEKRDAIDTKNQADSVVYQTEKQLKELGDKVPAPVKEKVDVKLQELKDAISGGSTQSMKDAMAALNQEVMQIGQAMYNQPGASAAGPTPGAEAGPTPGIYLSGTIIRGTLKTPNSQLVTPISIKLQRPDGARTRAKSRKTANSAPPDPRARTRAKSRKTANSAPPDPRARTRAKSRKTAYSAPPDPRARTRAKSRKTANSAPPDPRAQTRAQPQKTTNSAPPDPRARTRAQPQKTTNSASLDPRARTPPRPLPNDLRLARPRGSDSASATEDRLDLGFGGASTSPNLGRRPATSTGSAIITLPRADSGHREQDRSLTEAGGRQQGLNRSDSCPSARLRCSSDGHDITPAGCQDLSGCHIGMALLERVGRAGTRTGQALSWGRSLPSPAWTLVTPYCKRTRPGRGTNTKATGFPPLSRPSPAASLPPFALAHALDPSGLGHAATFTRRLRDPRSRNADIT

SEQ ID NO: 80304 - protein, 109 aa, Zea mays
  Coding DNA Sequence Number=SeqID_38525
  Gene Ontology: Mol. function=nucleic acid binding
  Homolog annotation: Hit_ID=Q7XJ13; Match level="QueryCoverage=57%, HitCoverage=9%, E-value=2e-17, Identity=69%"; Hit description =Chloroplast nucleoid DNA-binding protein-like protein
MGRAINKTIMVVELIKNTTTGSTDITDMWEPLEEGLLLLETTRHVSMITITLSKKELDTSSIGQGLGPLLPDGILPGSEIQAPPANSAYPADAWTIWLVRQGTIPCTTS

SEQ ID NO: 80305 - protein, 212 aa, Zea mays
  Coding DNA Sequence Number=SeqID_38526
  Gene Ontology: Mol. function=ATP-dependent helicase activity
  Homolog annotation: Hit_ID=Q6S4Y1; Match level="QueryCoverage=44%, HitCoverage=16%, E-value=2e-32, Identity=77%"; Hit description=DEAD box RNA helicase
  Pfam annotation: Domain name=Alba; Domain location=35-99; Score=41.9; E_value=2.2e-09; Accession=PF01918.11; Description=Alba
  Pfam annotation: Domain name=DEAD; Domain location=95-212; Score=9.3; E_value=9.1e-07; Accession=PF00270.19; Description=DEADDEAH box helicase
  Pfam module annotation: Pfam domain module=Alba::DEAD; Domain location=35-99::95-212
MAPKGFVYCFCCNLQLLQHYRKSQELFDVPMKTQMDVAILLLSTCCHFCHMVHDKGSDEVVFKATGRAINKTVMVVELIKRRIVGLHQNTTTGSTDITDMWEPLEEGLLPLETTRHVSMITITLSKKELDKSSIGSTCVYGDAPKGPQIRDLRRGVEIVIATPGRLIDMMEVGHTNLRRVTYLVLDEADRMLDMGFEPQIRKIVAQVIIGSL

SEQ ID NO: 80306 - protein, 257 aa, Zea mays
  Coding DNA Sequence Number=SeqID_38527
  Gene Ontology: Mol. function=ATP-dependent helicase activity
  Homolog annotation: Hit_ID=Q6S4Y1; Match level="QueryCoverage=36%, HitCoverage=16%, E-value=7e-32, Identity=78%"; Hit description=DEAD box RNA helicase
  Pfam annotation: Domain name=Alba; Domain location=35-99; Score=41.9; E_value=2.2e-09; Accession=PF01918.11; Description=Alba
  Pfam annotation: Domain name=DEAD; Domain location=95-219; Score =21.4; E_value=8.8e-08; Accession=PF00270.19; Description=DEADDEAH box helicase
  Pfam module annotation: Pfam domain module=Alba::DEAD; Domain location=35-99::95-219
MAPKGFVYCFCCNLQLLQHYRKSQELFDVPMKTQMDVAILLLSTCCHFCHMVHDKGSDEVVFKATGRAINKTVMVVELIKRRIVGLHQNTTTGSTDITDMWEPLEEGLLPLETTRHVSMITITLSKKELDKSSIGSTCVYGDAPKGPQIRDLRRGVEIVIATPGRLIDMMEVGHTNLRRVTYLVLDEADRMLDMGFEPQIRKIVAQSGLRAKSQNVQGLTQKIHQTLGLFSKLARRRGICASEPSDPSPAAMIRSYR

SEQ ID NO: 80307 - protein, 156 aa, Zea mays
  Coding DNA Sequence Number=SeqID_38528
MEESTSSAWRATQRLRRRDSRLCLRTADDSTSPYSRRGRPGWWIRCIPWPALWRQGDMLRRGVFFVFVYIMLDCISQLLFQTIIAYLLSPQAPKYNGNDYLPMDIVELSSDHLIENKPLLLKDVKFQNVHGGCGNTITVNMLPFLSYGPCVSPFEN

SEQ ID NO: 80308 - protein, 237 aa, Zea mays
  Coding DNA Sequence Number=SeqID_38529
  Homolog annotation: Hit_ID=Q6K9X4; Match level="QueryCoverage=33%, HitCoverage=13%, E-value=6e-14, Identity=49%"; Hit description =Ubiquitin-protein ligase-like
VANCELLASSAIECTRVAEPKMMPQGQLLLRAGARHGDVVIAASRDTMRISSGPMEWSRLRHRRQRRESRLLSRWVARQAEEVLSSMEREVERHNREAELLALARLHPAPSLNAPSSLLQMWRELEHPRTDAAHPFDREPYPDNADRDRERVRQIKGMTEKGMTGARAVARCRPCARRGGTLVSRLSWRGWRRAGGQFTEMEPRRVIRGWRRSMRFAGGGGFRGGGGTGFVAGEARA

SEQ ID NO: 80309 - protein, 186 aa, Zea mays
  Coding DNA Sequence Number=SeqID_38530
MWSIYFSGNSVPHGCVWVYRHGNTEKCNVLVTTHLRSGVPHSLGNLLRSYMVFALVLNVSIEDVVSIGGHFSISLRQYMLCPLEKQHPETLALSGNVSRLSLLLNPSSLARNFVIARALTRFVSSPARFMFNLVVVLRVIKKFQESSEDEANRVIFTDCATKSSDILRDSSSIRQNYSDEEKIFSS

SEQ ID NO: 80310 - protein, 61 aa, Zea mays
  Coding DNA Sequence Number=SeqID_38531
MARVARTLLAKDRLKGVVAMWSIYFFGNLVPHGCVWVYRRGNTENYNVLVTTHLRSGKKVH

SEQ ID NO: 80311 - protein, 110 aa, Zea mays
  Coding DNA Sequence Number=SeqID_38532
MEERTQGVGAWASMAAGFVCAGHGEKGVALGRGWSRERQPWATASSQLELGPVWPWQGSCRHPRARVEKAATKGRAGGGAMVGAEGGTRAHGAGRALGHGGRCPGASVLR

SEQ ID NO: 80312 - protein, 162 aa, Zea mays
  Coding DNA Sequence Number=SeqID_38533
MDDGELAAAAAGKRGAGGVGMEQGLGMGEHPRAAKEDEEAERGFGFHGEEGEPAGWKTSRALQGRHDCSSSKQGEQQQGRHGRGGAEVPIAATCQGEEEGRRWPLREILGAMEERTQGVGAWASMDVGFLCAGHGEKGVALGRGAWAASMREKEAGKKEGGG

SEQ ID NO: 80313 - protein, 385 aa, Zea mays
  Coding DNA Sequence Number=SeqID_38534
  Gene Ontology: Mol. function=extracellular ligand-gated ion channel activity; Cellular component=postsynaptic membrane; Biological process=gamma-aminobutyric acid signaling pathway
  Homolog annotation: Hit_ID=Q6QP51; Match level="QueryCoverage=79%, HitCoverage=95%, E-value=1e-18, Identity=35%"; Hit description =Putative growth-regulating factor 1
MAAADGRKRRSNRLWAHVPSWSSRGALSHGTGKGDISKGILLREGSEPRALLLIRGSKAGPSEGLAPQKGSTAASEHSGSAPTTDQGFEGWPLEGFDSRPRARRVRDDSGSDFVTESHQREASSPRTLSNGTWSGKSPAETDGHDLGQSFVHSRDAISPRPSPASGRNSTPRRSHASPEDLLKQQAHHRLARGPAREGFAVKQPWPDRLTNRPYRRSIQCEDRLTPYPDAHSSVDTAELSLASSATGNSASPDLRAWPPPRPQKVVSASPDPKARPQPWPRKVVSASPDPRAWPQPRPRKTVSASSDPRARPQPRPRKESRPRPTPASASGGVSASPDLGLGPTTPQGATGNKTDVPSGSPRPDSCASIGLKRSFNGHDTACIGL

SEQ ID NO: 80314 - protein, 367 aa, Zea mays
  Coding DNA Sequence Number=SeqID_38535
  Gene Ontology: Mol. function=extracellular ligand-gated ion channel activity; Cellular component=postsynaptic membrane; Biological process=gamma-aminobutyric acid signaling pathway
  Homolog annotation: Hit_ID=Q6QP51; Match level="QueryCoverage=73%, HitCoverage=90%, E-value=1e-15, Identity=35%"; Hit description =Putative growth-regulating factor 1
MAAADGRKRRSNRLWAHVPSWSSRGALSHGTGKGDISKGILLREGSEPRALLLIRGSKAGPSEGLAPQKGSTAASEHSGSAPTTDQGFEGWPLEGFDSRPRARRVRDDSGSDFVTESHQREASSPRTLSNGTWSGKSPAETDGHDLGQSFVHSRDAISPRPSPASGRNSTPRRSHASPEDLLKQQAHHRLARGPAREGFAVKQPWPDRLTNRPYRRSIQCEDRLTPYPDAHSSVDTAELSLASSATGNSASPDLRAWPPPRPQKVVSASPDPKARPQPWPRKVVSASPDPRAWPQPRPRKTVSASSDPRARPQPRPRKESRPRPTPASASGGVSASPDLGLGPTTPQGGPPRGRNADKMLLNYVNIL

SEQ ID NO: 80315 - protein, 111 aa, Zea mays
  Coding DNA Sequence Number=SeqID_38536
MEATSGQKPSDIEVYQEGHKGPNPNNPDQLCSQTSTDRTGGGGGGASGRGRGSRANAGGGSELVSDPGSAVEAGAGTDSDWGRAAGAAGTEVVTDTATAVVVTADAGGTGG

SEQ ID NO: 80316 - protein, 676 aa, Zea mays
  Coding DNA Sequence Number=SeqID_38537
  Subcellular localization annotation: CTP_CleavageSite=66; ConfidenceScore=5.59e-01
MSGGSPDSYCALSGDFSPSSAISLLSGDPTATTCFSPSLSVTLIAHVPSPVLPGSSPLVHQFRMPRTKNVSALGGGDDEDPRRPFRQVKGKTVYLEQQEGRKKRRTDRAARALASAAAAAAQAELGDQPQTPSDQIAYRVRRLASRPRSSTHTTASTPPPTLPAPVTPVAPSTTIAIPATSTTPSSTAPPPAPASAPPVPPPRFQERDETKVQPLVADPRLFDLQRAIAARVRRFRYVTVESWLPAQRDPAAVDLFSTRIQESFFRAQMSAQIALRVHRLLDLPAFLLAAGANSEAHLTYLPGLLTLLTTSGRYVEEWVRVFYASVWIDPDHHWMRFRFEREDVTITASQIRQLFGFPESTTRLHSLCYGTSDPPRRPHGGVAPGTAHVAALFRPPFSDGSRRSPADFTTAAKYLFELIRRTLLPRMGYREATTHIQLWLLGALVSHSEFDVVDFLICEIEDTVLDGILARRQLPYAHYLCHIFAQLIQPPRFQGTLEASRLVFGSYRPAPEAPVPASAPVFDSQAEDAALRQFDTQDTADDDDDDDDFGFPPPPPPPMPPRSHDHEAGSSSVAPAAPPAMNPALASILQSITQQQAHLAAEQARLSERMLLMFQNMQDRQDALQQQLLQDWAESRAFMALMLQHSAPAAWPQSESVPAPASIADPGSETDSDPPP

SEQ ID NO: 80317 - protein, 451 aa, Zea mays
  Coding DNA Sequence Number=SeqID_38538
  Homolog annotation: Hit_ID=Q6YZC6; Match level="QueryCoverage=38%, HitCoverage=88%, E-value=1e-60, Identity=66%"; Hit description =Cation exchanger-like protein
MRLNKVEVNLIRLLEAAPWQQNQAKLLYYVTTARELLEQLGAETTPEGISSISKAKLSEYSEKIEALASRLAASLPENEKPITESRDEISYDEAKAESPISLSSGLRRRSTKLQEDLTDEMVELARQLKESSLMMNQSVQETEKILDSTERAVEHSLASAGHATSRAAESGRLAMPCPRVASPTRLPCGPASVFPSGLRATTAMAMVFPSTQPATAMPLGLPLRPLRNRHGLPLRATTATAMPLPRTIRHAFASQDPPCQRLGFSSVQPPDPPPSPPQNSHVPASANPMRRSTAARPARTCLSFPSALKQPSRAEEMRPQIWTLRAATRTAMQPPRTIRHAPASHDPPCQRLGFPFVQPPDPPGPCLSFPSALGLAHKFGNAPTNLEATAMAPDLAMASLIWKSHNLRRRFGKHDLADLGGSKQEPTPHLPLFRAIGLAKQKRYNQSQLHS

SEQ ID NO: 80318 - protein, 231 aa, Zea mays
  Coding DNA Sequence Number=SeqID_38539
  Subcellular localization annotation: CTP_CleavageSite=32; ConfidenceScore=5.41e-01
MAMVFPSTQPATAMPLGLPLRPLRNRHGLPLRATTATAMPLPRTIRHAFASQDPPCQRLGFSSVQPPDPPPSPPQNSHVPASANPMRRSTAARPARTCLSFPSALKQPSRAEEMRPQIWTLRAATRTAMQPPRTIRHAPASHDPPCQRLGFPFVQPPDPPGPCLSFPSALGLAHKFGNAPTNLEATAMAPDLAMASLIWKSHNLRRRFGKHDLGTAITTTIPQMSRPPTSS

SEQ ID NO: 80319 - protein, 218 aa, Zea mays
  Coding DNA Sequence Number=SeqID_38540
  Subcellular localization annotation: CTP_CleavageSite=19; ConfidenceScore=5.03e-01
MPLGLPLRPLRNRHGLPLRATTATAMPLPRTIRHAFASQDPPCQRLGFSSVQPPDPPPSPPQNSHVPASANPMRRSTAARPARTCLSFPSALKQPSRAEEMRPQIWTLRAATRTAMQPPRTICHAPASHDPSCQRLGFPFVQPPDPPGPRLSFPSALGLAHKFGNAPTNLEATAMAPDLAMASLIWKSHNLRRRFGKHDLGTAITTTIPQMSRPPTSS

SEQ ID NO: 80320 - protein, 231 aa, Zea mays
  Coding DNA Sequence Number=SeqID_38541
  Subcellular localization annotation: CTP_CleavageSite=32; ConfidenceScore=5.47e-01
MAMVFPSTQPATAMPLGLPLRPLRNRHGFPLRATTATAMPLPRTIRHAFASQDPPCQRLGFSSVQPPDPPPSPPQNSHVPASANPMRRSTAARPARTCLSFPSALKQPSRAEEMRPQIWTLRAATRTAMQPPRTIRHAPASHDPPCQRLGFPFVQPPDPPGPCLSFPSALGLAHKFGNAPTNLEATAMAPDLAMASLIWKSHNLRRRFGKHDLGTAITTTIPQMSRPPTSS

SEQ ID NO: 80321 - protein, 235 aa, Zea mays
  Coding DNA Sequence Number=SeqID_38542
  Subcellular localization annotation: CTP_CleavageSite=19; ConfidenceScore=5.02e-01
MPLGLPLRPLRNRHGLPLRATTATAMPLPRTIRHAFASQDPPCQRLGFSSVQPPDPPPSPPQNSHVPASANPMRRSTAARPARTCLSFPSALKQPSRAEEMRPQIWTLRAATRTAMQPPRTIRHAPASHDPPCQRLGFPFVQPPDPPGPCLSFPSALGLAHKFGNAPTNLEATAMAPDLAMASLIWKSHNLRRRFGKHDLADLGGSKQEPTPHLPLFRAIGLAKQKRYNQSQLHS

SEQ ID NO: 80322 - protein, 165 aa, Zea mays
  Coding DNA Sequence Number=SeqID_38543
  Gene Ontology: Mol. function=hydrogen ion transporting ATP synthase activity, rotational mechanism; Cellular component=nucleus; Biological process=ATP synthesis coupled proton transport
  Homolog annotation: Hit_ID=Q1SKF0; Match level="QueryCoverage=93%, HitCoverage=54%, E-value=4e-41, Identity=58%"; Hit description =FKBP12-like protein
MHFAKIKVEESAPGAATGVILSLRERNNILLLCSLQDCKQSLASCQVELEAAKSEIEKWHSAFQSIPAVPSGTSPDPVSVVSYLSNLKSSEESLKEQLEKAKKREAAFIVTFAKREQEIAELKSAVRDLKTQLRPPSMQTRRLLLDPAIHEEFTRLKDPGHSCDA

SEQ ID NO: 80323 - protein, 427 aa, Zea mays
  Coding DNA Sequence Number=SeqID_38544
  Gene Ontology: Mol. function=hydrogen ion transporting ATP synthase activity, rotational mechanism; Cellular component=proton -transporting two-sector ATPase complex; Biological process=ATP synthesis coupled proton transport
  Homolog annotation: Hit_ID=Q69XX8; Match level="QueryCoverage=57%, HitCoverage=83%, E-value=1e-83, Identity=65%"; Hit description =Putative FKBP12 interacting protein
  Subcellular localization annotation: CTP_CleavageSite=55; ConfidenceScore=5.03e-01
MPNTTPAHAQDQPAGAPEGWHAEAANPTRTRIQTSTRGTAPCPRGCDPRPAASPPAARTPSQDPQRPEVPNERCAHCHQEAAEAEPRRRRVAVPLTPLPPPGNPTRSGQTRPNQRKIAPPPPSLGPRGHPAAPSGDGEGKIKVEENAPGAATGVILSLRESIHELAMIRPPLHPWQQNQALLVELEAAKSEIEKWHSAFQSIPAVPSGTIPDPVSVVSYLSTLKSSEESLKEQLEKAKKREAAFIVTFAKREQEIAELKSAVRDLKTQLRPPSMQNLVEEKEKKIKELQDNVAAVNFTPSSKLGKMLMAKCRTLQEENEEIGTMASEGKIHELGMKIAVLKSQNNELRNQFDVLYKHMDGVTNDVERSNELVSILQEELEAKDLELTRLKEVLAQKGATQDAPVETSDDAGNGQEADSDTLQVKAES

SEQ ID NO: 80324 - protein, 51 aa, Zea mays
  Coding DNA Sequence Number=SeqID_38545
MTSPDLRYWTTKARSTAAVGICYGVGGGVVSPRRVYDVHVFVVYFSGNEQL

SEQ ID NO: 80325 - protein, 232 aa, Zea mays
  Coding DNA Sequence Number=SeqID_38546
MAQQRLLALLLVAALLVLSCSQGNAEPSNGYHRQQIRDPHLSSPPLPRFVEQEKKERGSHICSLSEKDTTKTWTSRGDIDSTPLDTYRERARKRRKKPSQSSSKSRGTRTRHQSEKGERMRVPSSLDPPRRHNTTPNFVAYADCYRATGLGCPISQIWTRHRQDNLSMAGVIVSSSAAHTKKSQEQDRPYSRRSARGCDCGQGIKLGRKNRAKAGKTNGTSDDGENDGVCML

SEQ ID NO: 80326 - protein, 84 aa, Zea mays
  Coding DNA Sequence Number=SeqID_38547
MGILGELDNVQLKPSKNPIKPKDVIKDCKFIQNPKNEDCNLADGEYILIPEQGVAQEVAQEPAPEPAIEDLPAQALEGKPQFYA

SEQ ID NO: 80327 - protein, 74 aa, Zea mays
  Coding DNA Sequence Number=SeqID_38548
MGILGELDNVQLKPSKNPIKLKDVIKDYCNLADGEYILIPEQGVAQEVAQEPAPEPAIEDLAAPALEGKPQFYA

SEQ ID NO: 80328 - protein, 118 aa, Zea mays
  Coding DNA Sequence Number=SeqID_38549
MEHKNRSSQAHSKIPLQRFEMGETRDVCEREGGVSWVRNGVQIVLTTMGREVGDCWSEVRGVRDQLNCPSGPVQLVLTREFRRENPSSTARRQVQLVYGQRGSQLKLSSAEVEKAQLS

SEQ ID NO: 80329 - protein, 118 aa, Zea mays
  Coding DNA Sequence Number=SeqID_38550
MEHKNRSSQAHSKIPLQRFEMGEARDVCEGEGGVSCVRNGVQIVLTTLGREVGDCWSEVRGVRDQLNCPSGPVQLVLTREFRRENPNSTARRQVQLVYGQRGSQLKLSSAEVEKAQLS

SEQ ID NO: 80330 - protein, 118 aa, Zea mays
  Coding DNA Sequence Number=SeqID_38551
MEHKNRSSQAHSKIPLQRFEMGEARDVCEGEGGVSWVRNGVQIVLTTLGREVGDCWSEVRGVRDQLNCPSGPVQLVLTREFRRENPSSTARRQVQLVYGQRGSQLKLSSAEVEKAQLS

SEQ ID NO: 80331 - protein, 118 aa, Zea mays
  Coding DNA Sequence Number=SeqID_38552
MEHKNRSSQAHSKIPLQRFEMGEARDVCEGEGGVSWVRNGVQIVLTTLGREVGDCWSEVRGVRDQLNCPSGPVQLVLTREFRRENPNSTARRQVQLVYGQRGSQLKLSSAEVEKAQLS

SEQ ID NO: 80332 - protein, 81 aa, Zea mays
  Coding DNA Sequence Number=SeqID_38553
MEHKNRSSQAHSKIPLQRFEMGEARDVCEGEGGVSWVRNGVQIVLTALGRELKKLNSAEVKFSWKAQLQLKKFSCFSARTL

SEQ ID NO: 80333 - protein, 174 aa, Zea mays
  Coding DNA Sequence Number=SeqID_38554
MTKNTRDTRFIPRFGHTTKVPYFLVEAPTKSRVSFNPNPPFADHKARMKKNKRDLEMKHKNRSSQAHSKIPLQRFEMGEARDVCEGEGGVSWVRNGVQIVLTALGREVGDCWSEVRGVRDQLNCPSGPIQLVLTREFRRENPSSTARRQVQLVYGQRGSQLKLSSAEVEKAQLS

SEQ ID NO: 80334 - protein, 137 aa, Zea mays
  Coding DNA Sequence Number=SeqID_38555
MTKNTRDTRFIPRFGHTTKVPYFLVEAPTKSRVSFNPNPPFADHKARMKKNKRDLEMKHKNRSSQAHSKIPLQRFEMGEARDVCEGEGGVSWVRNGVQIVLTALGRELKKLNSAEVKFSWKAQLQLKKFSCFSARTL

SEQ ID NO: 80335 - protein, 174 aa, Zea mays
  Coding DNA Sequence Number=SeqID_38556
MTKNTRDTRFIPRFGHTTKVPYFLVEAPTKSRVSFNPNPPFADHKARMKKNKRDLEMKHKNRSSQAHSKIPLQRFEMGEARDVCEGEGGVSWVRNGVQIVLTALGREVGDCWSEVRGVRDQLNCPLGPVQLVLTREFRRENPSSTARRQVQLVYGQRGSQLKLSSAEVEKAQLS

SEQ ID NO: 80336 - protein, 107 aa, Zea mays
  Coding DNA Sequence Number=SeqID_38557
MTKNTRDTRFIPRFGHTTKVPYFLVEAPTKSRVSFNPNPPFADHKARMKKNKRDLEMKHKNRSSQAHSKIPLQRFEMGEARDVCEGEGGVSWVRNGVQIVLTALGRE

SEQ ID NO: 80337 - protein, 185 aa, Zea mays
  Coding DNA Sequence Number=SeqID_38558
MGREGRTQISTMTKNTRDTRFIPRFGHTTKVPYFLVEAPTKSRVSFNPNPPFADHKARMKKNKRDLEMKHKNRSSQAHSKIPLQRFEMGEARDVCEGEGGVSWVRNGVQIVLTALGREVGDCWSEVRGVRDQLNCPLGPVQLVLTREFRRENPSSTARRQVQLVYGQRGSQLKLSSAEVEKAQLS

SEQ ID NO: 80338 - protein, 82 aa, Zea mays
  Coding DNA Sequence Number=SeqID_38559
MAVDPLYSPRRDATLCLRQEPSVRPLSHEEETSAAKWEAFRGEESARVHAEVDGGRQSDERGGVLGAPDVRHADPPRRTAAP

SEQ ID NO: 80339 - protein, 390 aa, Zea mays
  Coding DNA Sequence Number=SeqID_38560
  Homolog annotation: Hit_ID=Q1SU13; Match level="QueryCoverage=33%, HitCoverage=33%, E-value=7e-15, Identity=35%"; Hit description=IMP dehydrogenase/GMP reductase
  Pfam annotation: Domain name=DUF1005; Domain location=6-156; Score =58.3; E_value=2.5e-14; Accession=PF06219.3; Description=Protein of unknown function (DUF1005)
MQHGEMVAPLSLYDDGWPGGGEVAMGMTGDGELLGYRFELVPDHNSNITDSAVCVAESSVPAVRGGQFAIDLTTAGSPGRGSSELGHALWPPGGFVMSAAVQEEGRRGRPSVGISVAHFGCAEDAAAFVALAAAVDLSMDAIRRAVIREFLRAYREGILDDNRIGFAIHRVMVNLVNTGATGVWIPNRRSHNRSSSRRRRAPPVVVPPPPPATATSTQVPASVFQMGETYPHGYCPFHGFGPCALRDAGVLEATLTAARQYYNSQAQPDAVPMEEMLATVAAPNLYSPTPEVEPTAPRWRPPTPAPPGFGRPPTRAARTGCPPFFNDDEVIPPPPSVVPMPSPALIERSRGAQIGLWANLNSVKVESPNSDGASASGFLFSDEEREDSLS

SEQ ID NO: 80340 - protein, 122 aa, Zea mays
  Coding DNA Sequence Number=SeqID_38561
  Homolog annotation: Hit_ID=Q1SU13; Match level="QueryCoverage=97%, HitCoverage=31%, E-value=2e-19, Identity=39%"; Hit description=IMP dehydrogenase/GMP reductase
  Pfam annotation: Domain name=DUF1005; Domain location=1-122; Score =59.7; E_value=9.3e-15; Accession=PF06219.3; Description=Protein of unknown function (DUF1005)
LGYRFELVPDHNSNITDSAVCVAESSVPAVRGGQFAIDLTTAGSPGRGSSELGHALWPPGGFVMSAAVQEEGRRGRPSVGISVAHFGCAEDAAAFVALAAAVDLSMDVCRLFSCKLRRELSA

SEQ ID NO: 80341 - protein, 172 aa, Zea mays
  Coding DNA Sequence Number=SeqID_38562
  Homolog annotation: Hit_ID=Q1SU13; Match level="QueryCoverage=70%, HitCoverage=31%, E-value=9e-17, Identity=41%"; Hit description=IMP dehydrogenase/GMP reductase
  Subcellular localization annotation: CTP_CleavageSite=65; ConfidenceScore=5.17e-01
MAFEAAFRMHMCAMHLPVMEKSRHTSMLRSTAAARATNAAASSAHPKCATLIPTEGLPRRPSSCTAADITKPPGGQSAWPNSLLPRPGDPGRGKIDGELPTADRRDARLGHAHGRVRDVAVVVGHQLEAVAQLGIPGAESAWMSWRFRGGGGKEMVYSFALIDSRDYYKSYL

SEQ ID NO: 80342 - protein, 193 aa, Zea mays
  Coding DNA Sequence Number=SeqID_38563
MRRGVVRGTGRALKRELGAWAGVVAKKPGDVREAEDTIESTALHVLTTFCGFHPLELSTHPIGLFLAEKEDDPMWKDRVEHAKDVWALYPGQTAHLMVEQMATQIQELEDQVEAREKTIEVLEDQLQTTKQQLEEANQHLDLHHQEIQDMEAEGADEDVVIEGGEELEPASSLDTAGSGRPPSPESSVASFAH

SEQ ID NO: 80343 - protein, 101 aa, Zea mays
  Coding DNA Sequence Number=SeqID_38564
  Subcellular localization annotation: CTP_CleavageSite=34; ConfidenceScore=5.50e-01
MTPAHAPSSLFRAPPVPRAHPSPHFAQLHLLSCSAHAASCRRRPAPAFPAIQLVEDRSKPPRAPPRDNEQSEVPECVVGDLPEQQPGEGKCPMTQYVLLTL

SEQ ID NO: 80344 - protein, 144 aa, Zea mays
  Coding DNA Sequence Number=SeqID_38565
  Subcellular localization annotation: CTP_CleavageSite=68; ConfidenceScore=5.88e-01
MAELNLPGQAASPSAPTRPWRPGTSRLESCPSPTSSSRPGVPMTAPSPCSCRSRRPLLLLSSPQNSSRSELAVNLAQQPRRQFTQPHGFSLCRALGVLDEMPQQQQRRPSLRRTRQDGPHAIDLRSICASSSKPAVSSSLSRVL

SEQ ID NO: 80345 - protein, 164 aa, Zea mays
  Coding DNA Sequence Number=SeqID_38566
MAPHSLQASCSPSNSFHGAQFICTAGIHRFLCSPWLSSPHGQELDAGHLPVSLAAGAVALACALSLLLPKPTSPAPTLFPTKQQPQRARRQPRAAAATPVHAATWVLAVSRPRRARRNAAAAAATPFAASHSPGRASRYRSAQHLWVVVETRGELLAVPCSLIL

SEQ ID NO: 80346 - protein, 62 aa, Zea mays
  Coding DNA Sequence Number=SeqID_38567
MARMLRWLPPLGRLPGAEVVAVASEAARCRGGCLCWRAARSRGFSLGGQVVRPDPLDGGSRY

SEQ ID NO: 80347 - protein, 135 aa, Zea mays
  Coding DNA Sequence Number=SeqID_38568
MARMLRWLPPLGRLPGAEVVAVASEAARCRGGCLCWRAARSRGSRRRCRSVGAEVVAFAGEPLGASYPHDPSGVEAVHICRVEMELELRLKADVILLLFVRLDLSRLQTSIPKEELAMAPRRQPRLGPEPPHSFG

SEQ ID NO: 80348 - protein, 38 aa, Zea mays
  Coding DNA Sequence Number=SeqID_38569
MELGLRLKANVILLLFVRPTGRAYEGGPHRVGVHVCVT

SEQ ID NO: 80349 - protein, 54 aa, Zea mays
  Coding DNA Sequence Number=SeqID_38570
MARMLRWSPPLGRLPGAEVVAAADQQAGLMRADLTGLAYTYALPSYKREKNSTP

SEQ ID NO: 80350 - protein, 181 aa, Zea mays
  Coding DNA Sequence Number=SeqID_38571
MKTLRWSPPLGRLPGAEVVAAAGEATRCRGGRLRWRAARSRGGHRRCPFLQSRDGARTPLEGGCNTFAFCKGLVWEAKLCVQTPWTVVLDTRTPVTEWWSVQAHDQQAGFMRADLTGLAYTYVLPSYKREKNSTPQTCSYGRTYRDAPVVRKRYSFSHSKIVTPRSVYSRHLGGSFPVGGE

SEQ ID NO: 80351 - protein, 139 aa, Zea mays
  Coding DNA Sequence Number=SeqID_38572
  Homolog annotation: Hit_ID=Q2QZ87; Match level="QueryCoverage=30%, HitCoverage=11%, E-value=2e-07, Identity=62%"; Hit description=ATP -citrate synthase, putative, expressed
MGAPVSVDRLWPRPPATSTLHALACSARHDMLFGEPGKSGLVALNLDFDQVKKFIKERLGIEAHRKIGDFIKGVFAVFQGSFPYRRHVNDLYRDFPTTALTLLDYLLAIEIILGKSDKFDELMVAAAAERREVEDEEQA

SEQ ID NO: 80352 - protein, 262 aa, Zea mays
  Coding DNA Sequence Number=SeqID_38573
  Homolog annotation: Hit_ID=Q2QZ87; Match level="QueryCoverage=27%, HitCoverage=28%, E-value=9e-19, Identity=54%"; Hit description=ATP -citrate synthase, putative, expressed
  Subcellular localization annotation: CTP_CleavageSite=49; ConfidenceScore=5.43e-01
MTLSAEQFRLPPDLPSLHTLPLPSRPCLLPRSRCRACVLCVVHGRPAPPAFLPASSPRFRPLCPPLLASTAPGRTPLAAPSACAPDGGLRDRPLLFTVACLPPPPGVYLRRGEEYDASGLLWRGGLQESRVGGGCPCRSCGLAMSISCPLCLPTRLLLGLGLASRGAVAPGAMRRLLGLALCASAATRSRPDMLFGKHGKSGLVALNLDFDQVKEFIKERLGIERGWATLSASQSVGGIEIEENWDKVKTIFLPTEKPTTFD

SEQ ID NO: 80353 - protein, 446 aa, Zea mays
  Coding DNA Sequence Number=SeqID_38574
MGGLGVSDGFARELMRTCAAPGGRMSSPELRESSARMLRVTGGWWPKNVPIPRAVGEDFFTSRMVRDWRVFPYGRNIAAVVSVVMDKDRQGAAQKRQAVVRLHEARPKRQRGAVKANAPGGDQPPLAAKSAVPASNRAPEAAKAAAAGGSKSAKVAPASSRVPEAAKAARGLPPPGKRVADFATDISVDDYLVGSDEGQLVVVPPAAATTAAAVVPKAKGGALSAGGEMPALTAIRDEAGAVSRRLKEMKEALSWAADFADRAASGALTVVVSAEVERLRTQHADAVREKSAADSKCRKLADKVAALEGEKTDLRRQLAEERKEANEALAKVQSMQAEANLARAEGSLAKQRAEQLEERLSALQARVERAEASTRSEAERTRKQLMDSYHELGARTADFEVPDREPGLRCLEWIQEELVALPAIVEGFMSYASLVTVGDLFSNAMS

SEQ ID NO: 80354 - protein, 474 aa, Zea mays
  Coding DNA Sequence Number=SeqID_38575
MPSHGGKLVRSPAFALDLHSRDPATFVREAEDGAVRIVGRELMRTCAAPGGRMSSPELRESSARMLRVTGGWWPKNVPIPRAVGEDFFTSRMVRDWRVFPYGRNIAAVVSVVMDKDRQGAAQKRQAVVRLHEARPKRQRGAVKANAPGGDQPPLAAKSAVPASNRAPEAAKAAAAGGSKSAKVAPASSRVPEAAKAARGLPPPGKRVADFATDISVDDYLVGSDEGQLVVVPPAAATTAAAVVPKAKGGALSAGGEMPALTAIRDEAGAVSRRLKEMKEALSWAADFADRAASGALTVVVSAEVERLRTQHADAVREKSAADSKCRKLADKVAALEGEKTDLRRQLAEERKEANEALAKVQSMQAEANLARAEGSLAKQRAEQLEERLSALQARVERAEASTRSEAERTRKQLMDSYHELGARTADFEVPDREPGLRCLEWIQEELVALPAIVEGFMSYASLVTVGDLFSNAMS

SEQ ID NO: 80355 - protein, 329 aa, Zea mays
  Coding DNA Sequence Number=SeqID_38576
  Gene Ontology: Mol. function=pectinesterase activity; Cellular component=cell wall; Biological process=cell wall modification
  Homolog annotation: Hit_ID=Q948H9; Match level="QueryCoverage=97%, HitCoverage=98%, E-value=1e-118, Identity=61%"; Hit description =Putative pectin methylesterase
  Pfam annotation: Domain name=Pectinesterase; Domain location=20-307; Score=202.0; E_value=1.4e-57; Accession=PF01095.10; Description =Pectinesterase
MGDRRVLLVASPEVAVFGYDGVVSLASVQDAVDTVPLNNQTRTVIRIGPGVHQQQVRIPRTKNFITLCGSSIKDTVICWDNRTTTCIKHTQPSGAIGTGTLSSATVIVEGDDFIAENVIFKNSAPQSGQAAAVRVTADRCAFYDCRFLGWQETLHLHGGKQLLKNCYVEGSYDFIFGDSAALLEHCHIHCKSAGYITAHGRKSSSEPTGFVFFKCVITGNGEAAYMYLGRPWEPFGRVVFAETFMDRCIEPAGWHNWDKPDNEQTACFYEYRCSGPGSSSSGRERWCKELFGDEAMPFLAQTFIDPDIENPWLVHRLGTPVPVSASSLE

SEQ ID NO: 80356 - protein, 73 aa, Zea mays
  Coding DNA Sequence Number=SeqID_38577
  Homolog annotation: Hit_ID=Q948H9; Match level="QueryCoverage=37%, HitCoverage=8%, E-value=2e-07, Identity=75%"; Hit description =Putative pectin methylesterase
MIFVHSAVGDLEPREQHCQSRALPPPCSSNTRVQEQRETERHKAETCTRRSKRFAHSQACPNYATQQALCIDP

SEQ ID NO: 80357 - protein, 171 aa, Zea mays
  Coding DNA Sequence Number=SeqID_38578
  Homolog annotation: Hit_ID=Q75HY5; Match level="QueryCoverage=45%, HitCoverage=9%, E-value=2e-10, Identity=48%"; Hit description=Unknow protein
MKLVEFSYSKIYGAEAMKYVKVVNDSLHELYKEYVAQPLPLTPAYVEANNVAANASVNQGNPSSTGDGLLDFDMYLSENRNKCKLIQATHYGMCFSFEMIFVHSAVGDLEPREQHCQSRALPPPCSSNTRVQEQRETERHKAETCTRRSKRFAHSQACPNYATQQALCIDP

SEQ ID NO: 80358 - protein, 172 aa, Zea mays
  Coding DNA Sequence Number=SeqID_38579
MEPDDEAEMNEDEDKLALAVAGGRAATSSRATSPCSRVRSSSGGGSSRGGEHGGGARAVGEPVKSTGKGKKQKKHYASFEYHGNSFEMREAGSSHPQAAMDAPEARSSASSSPEFEFWPLYPNPAASPSCADELFAGGVLLPLPILPPKPESRKKGSGISQFVPVAEPELEP

SEQ ID NO: 80359 - protein, 1150 aa, Zea mays
  Coding DNA Sequence Number=SeqID_38580
  Gene Ontology: Mol. function=nucleic acid binding; Cellular component= intracellular; Biological process=metabolic process
  Homolog annotation: Hit_ID=Q6EUH6; Match level="QueryCoverage=52%, HitCoverage=89%, E-value=1e-100, Identity=35%"; Hit description =Pentatricopeptide (PPR) repeat-containing protein-like
  Pfam annotation: Domain name=PPR; Domain location=1005-1039; Score =15.1; E_value=0.12; Accession=PF01535.11; Description=PPR repeat
  Pfam annotation: Domain name=PPR; Domain location=1041-1075; Score =6.7; E_value=1.2; Accession=PF01535.11; Description=PPR repeat
  Pfam annotation: Domain name=PPR; Domain location=635-669; Score=2.9; E_value=3.4; Accession=PF01535.11; Description=PPR repeat
  Pfam annotation: Domain name=PPR; Domain location=702-736; Score=2.1; E_value=4.2; Accession=PF01535.11; Description=PPR repeat
  Pfam annotation: Domain name=PPR; Domain location=768-802; Score =40.1; E_value=7.5e-09; Accession=PF01535.11; Description=PPR repeat
  Pfam annotation: Domain name=PPR; Domain location=803-837; Score=1.9; E_value=4.4; Accession=PF01535.11; Description=PPR repeat
  Pfam annotation: Domain name=PPR; Domain location=869-903; Score =17.4; E_value=0.053; Accession=PF01535.11; Description=PPR repeat
  Pfam annotation: Domain name=PPR; Domain location=970-1004; Score =38.9; E_value=1.7e-08; Accession=PF01535.11; Description=PPR repeat
  Pfam module annotation: Pfam domain module=PPR::PPR::PPR::PPR::PPR::PP R::PPR::PPR; Domain location=1005-1039::1041-1075::635-669::702 -736::768-802::803-837::869-903::970-1004
MAEVAARDFDSAAPVALNPRRHCGRRSGSEKQRRRRLTISKLLSCALDRFPYSYGHRLRVLLLARILRLRLHLIRLLILAPRIVAASGPSPAAVGLRFGHMFALLHLLAAWPGPMHGGRARGGRGEIEGGGGEGLAAEGAVAKGAGEGGGGLERAHEEKEAYHLEAVVVVLKGSIVLLLLLPLASALDRFPYSYGHRLRVLLLARILRLRLHLIGLLILAPRIVAASGPSPAAVGLRFGHMFALLHLLAAWPGPMHGGRARGGRGEIEGGGGEGLAAEGAVAKGAGEGGGGLERAHEEKEAYHLEAVVVVLKGSIVLLLLLPLASALDRFPYSYGHRLRVLLLARILRLRLHLIGLLILAPRIVAASGPSPAAVGLRFGHMFALLHLLAAWPGPMHGGRARGGRGEIEGGGGEGLTVEGAVAKGAGEGGGGLERAHETEHYSQNRKQSVLSCVHLLAGGPRGKAGGGSDGVTKRAAAPAPRWTTDNRRRQLADVGCFPAVASMQPLQKLLEAAAATSTPLAAAHLHANILRSGLLHSSHHLTAHVLACYPPGLARDLFDEIRSPTPRLANALLRAHIRARQWRAAILLGQRLRVRRDGFTLSLLLRACTALPSLTHGRAVHAAAVRSCTASEDAFVATAIVQMYSRCGDMAGAINAYGMLEKPDIVLRTSVVTGYEQNGMAEEALEFFARNVVGQGVLVTPVTLVSVMSAAAQLGHVRKGQACHAYVVRNSLSYDLALVNAVLGFYVKIGDLQASMRLFEGMTDRDVITWSCMIKGYVQHGDAHTGFRMYREMVKARVQPNSVTLVSVLQACALVVDAEEGKRLHRVAVSIGCELELGVATALVDMYMKCSCHEEAMRLFHRMPKKDVVAWAAVIGGLTQNELPGESLHSFKCMLLNDHVPDAVTMVKVLAACSEFGGNRLAICLHGYLVRNGFNNNAFVAAALLDLYSKCGDLDSAVRVFEGTTEKDIVVWGSMIAGYGAHGLGQEAVALYQRMIASSIQPNNVTFLSVLSACSHSGLVQEGIQIFDSMTQVFGVVPNAEHQSAMVDLLGRAGELQEAIRVIRDMDGRAVAHTWCALLAACRKHNNTKMSEVAAKNLLKLDPDHVGYYNLLTNLYAFDEKWENVKDTRDMVKGRDLRKVAGYSSVEVTN

SEQ ID NO: 80360 - protein, 472 aa, Zea mays
  Coding DNA Sequence Number=SeqID_38581
  Gene Ontology: Mol. function=cysteine-type peptidase activity; Biological process=proteolysis
  Homolog annotation: Hit_ID=Q53MK8; Match level="QueryCoverage=57%, HitCoverage=27%, E-value=8e-21, Identity=31%"; Hit description=Ulp1 protease family, C-terminal catalytic domain, putative
MDQDQNVSGQQGAHAVRRSPRVENKRKQLDKNELKERKKRLRLKVPPIQDAESDDEKDTEFVPGGDGSGDDNVGIVGGDENKGITKTRAIRCSPGKFIKLVNSLSDELKSEVVAKGFGGLLRFKPHLLSRKLLSWLMRKLNPETMKLEIGGGKEIQITEHSVWCVLQLPNVGSDPPPMSDADARALRDELGEQICGKSYRRISGINISVITDRLQKRTLNGELGLRAFFMAAFQCLLFSNTDTRIRIDDVKYTQDIQNMGNKNWCRAVEDKLSIAARLYRKDFAEKGINAPISGCGIFVAMLYVDNLQHGLDTSPFSIPRCAFLDSKMIDAIANMDLRGDVPPGTTEFGHLRLRSITDTCYGVPIGALAILHAPVPAPAPVAVPNPTAAPNPVAAASVPVATAAPTGTSADVLGTSHDLVGHASFNIQPPVFYQYPSFRSSFGQSITDLVGRSRKSDALNILKAFDESTSEA

SEQ ID NO: 80361 - protein, 166 aa, Zea mays
  Coding DNA Sequence Number=SeqID_38582
MQMLYVDNLQHGLDTSPFSIPRCAFLDSKMIDAIANMDLRGDVPPGTTEFGHLRLRSITDTCYGVPIGALAILHAPVPAPAPVAVPNPTAAPNPVAAASVPVATAAPTGTSADVLGTSHDPVGHASFNIQPPVFYQYPSFRSSLGQSITDLVGRSRCRCAEHLEGV

SEQ ID NO: 80362 - protein, 310 aa, Zea mays
  Coding DNA Sequence Number=SeqID_38583
  Gene Ontology: Mol. function=protein binding; Cellular component =nucleus; Biological process=actin cytoskeleton organization and biogenesis
  Homolog annotation: Hit_ID=Q10R48; Match level="QueryCoverage=95%, HitCoverage=69%, E-value=1e-161, Identity=90%"; Hit description =Kelch repeat-containing F-box family protein, putative, expressed
  Pfam annotation: Domain name=Kelch_1; Domain location=142-188; Score =40.2; E_value=6.9e-09; Accession=PF01344.15; Description=Kelch motif
  Pfam annotation: Domain name=Kelch_1; Domain location=53-92; Score =5.5; E_value=0.93; Accession=PF01344.15; Description=Kelch motif
  Pfam annotation: Domain name=Kelch_1; Domain location=94-140; Score =58.8; E_value=1.8e-14; Accession=PF01344.15; Description=Kelch motif
  Pfam annotation: Domain name=Kelch_2; Domain location=142-188; Score =13.9; E_value=0.57; Accession=PF07646.5; Description=Kelch motif
  Pfam annotation: Domain name=Kelch_2; Domain location=195-235; Score =3.0; E_value=15; Accession=PF07646.5; Description=Kelch motif
  Pfam annotation: Domain name=Kelch_2; Domain location=94-140; Score =25.3; E_value=0.00022; Accession=PF07646.5; Description=Kelch motif
  Pfam module annotation: Pfam domain module=Kelch_1::Kelch_1::Kelch _1::Kelch_2::Kelch_2::Kelch_2; Domain location=142-188::53-92::94 -140::142-188::195-235::94-140
MVRSGEIYRLRRQNGVAEHWVYFSCNVLEWDAYDPYRERWIQVPKMPPDECFMCSDKESLAVGTELLVFGMARIVFRYSILTNSWTRAHPMNSPRCLFGSTSVGEKAFVAGGTDSIGNILSSAEMYDSETHTWTPLPSMNRARKMCSGVFMDGKFYVIGGVANNNKLLTCGEEYDLKRRSWRIIENMSEGLNGVTGAPPLIAVVSNELYAADYSENDLKKYDKKNNRWITLGKLPERSVSMNGWGLAFRACGDCLIVIGGPRTYTGRTIELNSWTPNERPPVWNLIARRPSGNFVGFCRLAQFRNYVDIS

SEQ ID NO: 80363 - protein, 98 aa, Zea mays
  Coding DNA Sequence Number=SeqID_38584
  Homolog annotation: Hit_ID=Q10R48; Match level="QueryCoverage=70%, HitCoverage=16%, E-value=2e-18, Identity=67%"; Hit description=Kelch repeat-containing F-box family protein, putative, expressed
MAAGAATLGDVRRVRLRRRRLAALAAAVSFVEVFDLDVFRRRALAAEDLVSEVRPLRLRLAGAQQGARNKEPKSNRKKVSGDEINGNKGIKNTGSLEI

SEQ ID NO: 80364 - protein, 83 aa, Zea mays
  Coding DNA Sequence Number=SeqID_38585
MCAQGSQKTGTGKWQQRKLKTREHAARIREIQVSVVFDLDVFWRRALAAEDLVGEAPKSNRKKVSGDEINGNKGIKNTGRLEI

SEQ ID NO: 80365 - protein, 66 aa, Zea mays
  Coding DNA Sequence Number=SeqID_38586
MAIKRTVQFWVRFVDDLAYVPVQVQETNTNITKGFSEKASKSNRKKVSGDEIKWNKGIKNTGRLEI

SEQ ID NO: 80366 - protein, 361 aa, Zea mays
  Coding DNA Sequence Number=SeqID_38587
MDPGTHMVCARFYPLEPGVTEVVSKMVRTLQTTRVNTSYAPQPRQVPVYPVVVEEVPANLPLVRVENVIILEDSSEEQLPTPTPLAESLAFAAGSSTSTSSAPAFQAPAPGGDDPDDSGDGDDEDDDDEDDGEDGHINEEADYAQQDHFMGIGPVVEHYTSMFETGHFPNLLQAVLHELGAHVRPLYETRRVSEPPRACYYITRIHVRVMDAGDRGFRTLSAHESLIPLSTYAASVSDAARRTLWSLSHTYRQQLQNTRFRHLPQRLRGESQTNIVPGEPGEDRLNTLAGVVAGLNTDLDSATLDLYSVHLELENAHARIAALEAQLQGLDPPEAQVPAVALSPPRKRMRYGEPGSVTRLL

SEQ ID NO: 80367 - protein, 155 aa, Zea mays
  Coding DNA Sequence Number=SeqID_38588
MVTSSLMVGESEPGCGLYPSLSLKEFGHGRGPPGSGIRPEVSAAAVRPPGAEVVVVAAAGAGDGAPFVGLLLLRKPTPIEWGCSYLRRGNRSSICNGTLNASVFVHYGCRGLNMDVCASESFFSRKVMSEVSVSRRRGSPSARSALPLTHTFTRP

SEQ ID NO: 80368 - protein, 213 aa, Zea mays
  Coding DNA Sequence Number=SeqID_38589
  Subcellular localization annotation: CTP_CleavageSite=56; ConfidenceScore=5.27e-01
MNKDAGIQGAITNGTPVPPPQARTTPQDWGTCGAIAGRRAARRHPVRQQRQPPSPRAAKQLRQRLRGGGYDRGALTRRGREPAIQAGRRRPRATGGVGNLVGREATSSCRRLEERRQAPALVRAAQSMGAALATNGRKEWAAMQAACNRAKWTRFSDSQRASMEAPAHASRNRRAGCCMQTTAPPLAPPSRLFGCGTNAATRGDPAHDPAAPA

SEQ ID NO: 80369 - protein, 190 aa, Zea mays
  Coding DNA Sequence Number=SeqID_38590
  Gene Ontology: Mol. function=structural constituent of ribosome; Cellular component=intracellular; Biological process=protein modification process
  Homolog annotation: Hit_ID=UPI0000E1F3EA; Match level="QueryCoverage =81%, HitCoverage=65%, E-value=1e-58, Identity=73%"; Hit description =PREDICTED: similar to RPS27A protein
  Pfam annotation: Domain name=Ribosomal_S27; Domain location=136-183; Score=109.9; E_value=7.6e-30; Accession=PF01599.9; Description =Ribosomal protein S27a
  Pfam annotation: Domain name=ubiquitin; Domain location=41-109; Score= 138.0; E_value=2.5e-38; Accession=PF00240.13; Description=Ubiquitin family
  Pfam module annotation: Pfam domain module=Ribosomal_S27::ubiquitin; Domain location=136-183::41-109
MHNLLARYYEDENAPTDTCAVCAVGGERRPPIAAKMQIFVKTLTGKTITLEVESSDTIDNVKAKIQDKEGIPPDQQRLIFAGKQLEDGRTLADYNIQKESTLHLVLRLRGGAKKRKKKTYTKPKKIKHKHKKVKLSVLQFYKVDDATGKVTRLRKECPNTECGAGVFMANHFDRHYCGKCGLTYVYNQKA

SEQ ID NO: 80370 - protein, 45 aa, Zea mays
  Coding DNA Sequence Number=SeqID_38591
MALSNGIDTRDARDSSSNFVGHHQAAWRRGRAPCVDVCSRWKKDF

SEQ ID NO: 80371 - protein, 81 aa, Zea mays
  Coding DNA Sequence Number=SeqID_38592
MPYRMGSTPGTPGIARRTLLVITKPHGDVVELPALMSAQGGRRISSRGIVCEWLRCVFTESRPCDRNGRTRLDLTHITSAL

SEQ ID NO: 80372 - protein, 94 aa, Zea mays
  Coding DNA Sequence Number=SeqID_38593
  Subcellular localization annotation: CTP_CleavageSite=39; ConfidenceScore=5.12e-01
MATSAETTSELDASISTTSFSPDVTTNADLTLDPGVLTSASSSASASHQPSPAIETTCSLQNGWCYAGQQDPPDQQDHYSSWSVVPVSKILPAL

SEQ ID NO: 80373 - protein, 125 aa, Zea mays
  Coding DNA Sequence Number=SeqID_38594
  Subcellular localization annotation: CTP_CleavageSite=49; ConfidenceScore=5.30e-01
MVKNFGSKTVQIAMNAVVTSHLLVCLYSAAGKKAKRQNFYTRRTPARTRCMVDRRDRTVTLQGGAAIRWEIESFLDNELREGMKAKSQHQPINLRSTCKNYATSKAEYTNTQLDLPGVRSLLLYL

SEQ ID NO: 80374 - protein, 115 aa, Zea mays
  Coding DNA Sequence Number=SeqID_38595
MKAKSHHQPIILRSSCKNCATSKAEYTNTQLDLPVTALVPTITEMGDHVSGRVRGKVCGQVHSADLSRFGQIQICNFKNSELKIQTSKQIDPRLSGKITKKSDPRLFGKLRKSTT

SEQ ID NO: 80375 - protein, 106 aa, Zea mays
  Coding DNA Sequence Number=SeqID_38596
MGKQRGCALTDKGQRQQVCSHPRSTNGEAFLSSKELGLEEGAEGEKGGRPWEEKLLLPAVGVREKLLPCGRREAAGKWLVARGVEARVADLRKGEETPWEALHWCA

SEQ ID NO: 80376 - protein, 279 aa, Zea mays
  Coding DNA Sequence Number=SeqID_38597
  Subcellular localization annotation: CTP_CleavageSite=36; ConfidenceScore=5.04e-01
MGLRKNSKHPASVDDVLSTGFTKQRADRALRRRGCCANGETEGLRVDGQGAATTSVQPPEVDERGGIFVEQGSTRLLPQILTMGKARQEREGAGMGMPGLLQWRSWKGHQLRPRKGGTAMLRFGQQLCARAENVADKGRAGGEGKMEQRSSGAAVPDIGARPRGRSRGGEGRPAMGGEGAVLPAAAVGSRAPCPGVRAGGRGAGALRLEPVPRGERLEKSGRHGWRKLPALAAAAMSSEEEGREYGWWRLGKNGGWECKIANLQGREVLFIEGALGLGF

SEQ ID NO: 80377 - protein, 517 aa, Zea mays
  Coding DNA Sequence Number=SeqID_38598
  Homolog annotation: Hit_ID=Q6QP51; Match level="QueryCoverage=59%, HitCoverage=100%, E-value=2e-32, Identity=49%"; Hit description =Putative growth-regulating factor 1
MMIASKKAGPSEGLTAALEHSGFKLITDQGFEGWPLGRVRQPPQSTRAPRPLLIRGSKAGPSEGFDSRPRARKARDDSRYVRYMAEARAMLPRPAKAQRKALRPQRSQTTPPRPRGLHLAETDGHDSGQGFVYPRDAISPRPSPASGGNSSPGRIHASPEGLLKRRAHPQLARSPARAGFIVKQPWPNCLTNRPYRRRIQCEDRLTTYPDTHASVGKVEEAPPRPTLGLGLGRRSPPRPTPGLGLNLGLGRRSPPRPTPGLALNLGLGRNRVLARPRPRPQGKSPPRPTLGSDRPRHGGYIITLPLASSGYGGTKTDVPSGSPRTDSCASTGLKHFSDGHVIAYAGLKHFSDSHVGIAGDDLAAADAVVLEDAVDKAGLDSISRLKDALTGTGAVLGADALVVGNTRINHRFGADVAGIGMFYGHSDDDLADDGQQHQANNCHLPLCTGSHGDGRRVLLANVAASVDTQTIRPPGADYPIRHREDSAPATCRELFGPRSRAIHAVAESTATDTPRYD

SEQ ID NO: 80378 - protein, 130 aa, Zea mays
  Coding DNA Sequence Number=SeqID_38599
MGDVRPLIIDQRLVHLTPHMFPCLRSCSWISGGDHFLGKNPNLLAFGIIENGRSWLFSTKIGVVWPLIFDQRLVPLSPYMFPCHRSHSWISGGDHFLVKHPYMLAFGIIENGRSWLFSTKMGVVWPLIID

SEQ ID NO: 80379 - protein, 73 aa, Zea mays
  Coding DNA Sequence Number=SeqID_38600
MAIIDKNGGCVAIDHRPEAHSRHPTYVSLPYVTFLDFGWRPFLGQKSLLAFGIVQNGRLCLFLTKMGVIAIDH

SEQ ID NO: 80380 - protein, 75 aa, Zea mays
  Coding DNA Sequence Number=SeqID_38601
MNNKNPVDLQPPEPHYKNTEHLSPTFLNCNLANGEYVLIPEQGPVQEEDQEQASEAAIEDLPAAPAIEGKPRFYA

SEQ ID NO: 80381 - protein, 362 aa, Zea mays
  Coding DNA Sequence Number=SeqID_38602
MTRPVSSPPTSIPACARGPTDSGHLRRRPAHRCDPRDLPFVLDHFTGAISPPWTYNHQSPTTKIQSTSAQLFKEYMLIPEQGPVQEEDQEQASEAAIEDLPAAPAIEGKPRYGGYKCGHCTAAAGVSGALYAKAVPFRKWLMVKAVERLQKWQQELEGNASDAALTEENLNAKEQSLDRRETDLARGETDLVFREEMLTRWGELLAEHELEAEEKEKKLEEQIRQFNVAQAAPGPQAVEATRKALEDLQAKHRAGVQRIAAWAGEASTTLIFDALPVLDSTVDRLRRLDQILGARLEAEGGKLRRAVVEYVLTCFRSHDPAISLAPVIVGPVVATEDAARESVQDTVELVAEHFQHDPTDDL

SEQ ID NO: 80382 - protein, 131 aa, Zea mays
  Coding DNA Sequence Number=SeqID_38603
MDSENEKLRKALATLLRVVQKRSCDIVDVVKSAFQPFNSPLVDELNRALVEIDDLAKDLEDVAVQTQWEVENMANSQVKEHPQQEEAVEDLLIQDGSEDDLLIDEESPINYEDLVGYDDGRDYSTDDTYPY

SEQ ID NO: 80383 - protein, 606 aa, Zea mays
  Coding DNA Sequence Number=SeqID_38604
  Homolog annotation: Hit_ID=Q8SA97; Match level="QueryCoverage=21%, HitCoverage=15%, E-value=2e-15, Identity=59%"; Hit description =Ornithine carbamoyltransferase
MALPVDVAGLCPRLGDVEAPPKPGSSLSSMAVAESEPLGRARRRSSAEAESEPLGRARRRSSAEAESEPLGRARRRSSAEAESEPLGRARRRSSAEAESEPLGRARRSSSAEAGPSPSPGSGGAEFAVFRGLARVRALGRAERRLLLSEGKASGKPEMCPPLKGGLGRDGNPFGLYADGGYQLRIRRLEGTLNVEGSGSALSALFVHQPPPGNFRAFLPRAGDCIFRGRALDPARFAAGIEAGGREAAVRRRVCRRRARTPWNRGRATHRNRRSKPASPCSSPESRHRQKASSSADFVEGSRQKEEKLLAAIVFVFDLVHRARSVKSEMQFITAMDSENEKLRKALATLLRVVQKRSCDIVDVVKSAFQPFNSPLVDELNRALVEIDDLAKDLEDVAVQTQWEVENMAKSQVKEHPQQEEAVEELLIQDGSEDELLIDEESPINYEDLVGYDDGLDGQPEGSRTLAVTKKPTQRTKLANFTAEEDTREKAKRTKSVDTSSSDSEFMTRMGDLSLERLSVYKTAVTTEEKKLDSMNRNERQKLLLEKKKLNLEKLRLERQKLKEDKEEEIMILSMDLSKCNPLLRQYYEAKQQEILARVTGSTSSGQ

SEQ ID NO: 80384 - protein, 465 aa, Zea mays
  Coding DNA Sequence Number=SeqID_38605
  Homolog annotation: Hit_ID=Q8SA97; Match level="QueryCoverage=27%, HitCoverage=15%, E-value=2e-15, Identity=59%"; Hit description =Ornithine carbamoyltransferase
MALPVDVAGLCPRLGDVEAPPKPGSSLSSMAVAESEPLGRARRRSSAEAESEPLGRARRRSSAEAESEPLGRARRRSSAEAESEPLGRARRRSSAEAESEPLGRARRSSSAEAGPSPSPGSGGAEFAVFRGLARVRALGRAERRLLLSEGKASGKPEMCPPLKGGLGRDGNPFGLYADGGYQLRIRRLEGTLNVEGSGSALSALFVHQPPPGNFRAFLPRAGDCIFRGRALDPARFAAGIEAGGREAAVRRRVCRRRARTPWNRGRATHRNRRSKPASPCSSPESRHRQKASSSADFVEGSRQKEEKLLAAIVFVFDLVHRARSVKSEMQFITAMDSENEKLRKALATLLRVVQKRSCDIVDVVKSAFQPFNSPLVDELNRALVEIDDLAKDLEDVAVQTQWEVENMAKSQVKEHPQQEEAVEELLIQDGSEDELLIDEESPINYEDLVGYDDGRDYSTDDTYPY

SEQ ID NO: 80385 - protein, 151 aa, Zea mays
  Coding DNA Sequence Number=SeqID_38606
MALPVDVAGLCPRLGDVEAPPKPGSSLSSMAEAESEPLGRARRRSSAEAESEPLGQARRRSSAEAESEPLGRARRRSSAEAESEPLGPVFLYVKRSCDLAGQCGDSVRVASNEGKASGKPEMCPPLKGGLGRDGNPFGVGCPCPRLGSGEA

SEQ ID NO: 80386 - protein, 416 aa, Zea mays
  Coding DNA Sequence Number=SeqID_38607
  Subcellular localization annotation: CTP_CleavageSite=49; ConfidenceScore=5.17e-01
MVKNFGSKTVQIAVNAVVTSHLLVCLYSAAGKKAKRQGFYTRRAVTCTRCAVDRKDQTVTLQGGTDTISGNGSFLGNELREGVFWTFGFPKLERIFSRFKLVTKNDLAPRKGLLLGPCFVAPKVLREEAASAEIVPRKWPKDRRYWRRLAAAEVRGTAGGEKMSSTGAGDDMPPVASVNTPAALRAPGHIDEQTKTTDVVGTEKHISMRHIGPHEQDTPHILQSHPRWVERVGEREGGKGARRPESGEREVGIPRPSCSSRAQVGCACSRGLQASTRVREASGPKRAPVPVLVPARPTFSKKALVLPFIGVRRGSRVMMALPVDVAGLCPRLGNVEAPPKPGSSLSSMAEAESEPLGRARRRSSAEAESEPLGQARRRSSAEAESEPLGRARRRSSAEAESEPLGRVERSSPSSRA

SEQ ID NO: 80387 - protein, 155 aa, Zea mays
  Coding DNA Sequence Number=SeqID_38608
MLRASSSAAPKVTPPLPDTRPTSGSGSQQQESGESGDGGPPLDAVKTAPVASHAPSGDSAVAAPAPSDVVEAEEIPPGGSAPTPDTRGDAGGASSSNPLPASEEMEVVFVRRLRSGAEQEAAPVPLPRVLSRAHQVLSDTRAAILRDWEALEAEP

SEQ ID NO: 80388 - protein, 185 aa, Zea mays
  Coding DNA Sequence Number=SeqID_38609
MAGGIKLAGAKEKWLAGEGECGAKRVTEALGLSLKRLPVPQDCCPSVTKDLVGTGQHAGEWDWRRFLLGARPEPPHKHHLHLLRRRQGVGAGRASCVTPSVGSGRGSPRWDLLCLYDVARRWRCYRRIPGWGMGSHWRCLNSIQRRTAITTLTRFLLLRAGPASGPGIWQRRRDLGSGGGRSPSE

SEQ ID NO: 80389 - protein, 149 aa, Zea mays
  Coding DNA Sequence Number=SeqID_38610
MSQHRHRAVRRRRSVCLHRVQAAAQRSSSCGGAPPSLAMFACSEPPLHLVVACLLCQGPGSPRPPLTGHGGRKVSLSAMVASPARPGPSTAVLVFGMALALASSRACVCAPDAAYEAPTRILHGPDAAAASRVLMPRRELVWPSLRDTW

SEQ ID NO: 80390 - protein, 178 aa, Zea mays
  Coding DNA Sequence Number=SeqID_38611
MSQHRHRAVRRRRSVCLHRVQAAAQRSSSCGGAPPSLAMFACSEPPLHLVVACLLCQGPGSPRPPLTGHGGRKVSLSAMVASPARPGPSTAVLVFGMALALASSRACVCAPDAAYEAPTRILHGPDAAAASRVLMPRRELVWPSLRDDDDDGYNYGNGKEEGVEANLQEFQDFDEFED

SEQ ID NO: 80391 - protein, 244 aa, Zea mays
  Coding DNA Sequence Number=SeqID_38612
  Subcellular localization annotation: CTP_CleavageSite=49; ConfidenceScore=5.23e-01
MGDGPSIEKETPNSVNPVAQLRVVLRLQITQGSSATVGVGSRCSAWHTRQSGATSDSPVNYSGVAPRIPESGKFGVDLPGAPDTIRWHTGQSGKCALGPFLSILVIECQRKCFCVDLCNVVDKVQIMSKGLEIGKIELEMRWLCSAKVSSVWVHRTVRWCTGQCLVRQTGSGELAVLGSSTAVYGYNSPGLSGGTPDCPEGYSHQTVSGGAPDCPVRQATDGKINLPGMLSMAPSCLGAIKGDP

SEQ ID NO: 80392 - protein, 75 aa, Zea mays
  Coding DNA Sequence Number=SeqID_38613
MSLRIFFLSRVRLAKVYFILKGKCALGLFLSILVIECQRKCFCVDLCNVVDKVQIMSKVLETGKIELGLRWLCSV

SEQ ID NO: 80393 - protein, 108 aa, Zea mays
  Coding DNA Sequence Number=SeqID_38614
  Subcellular localization annotation: CTP_CleavageSite=63; ConfidenceScore=5.08e-01
MAGGKTLAGAKERWLLGEGTGSCSVTKVPVSECLVPRLSCAKTVSNGFGLSSNFPRMCSRETLGDTGVSQPSPLKGISSRDSGQSPPGVKRRIRKVGGGVGGDYIPAS

SEQ ID NO: 80394 - protein, 74 aa, Zea mays
  Coding DNA Sequence Number=SeqID_38615
MAGGNTLAGAKERWLADEGTGSCSVTKVPVSECLVPRLSCAKTVSNGFGLSSNFPRMCSRETLGDTGVSQQQGK

SEQ ID NO: 80395 - protein, 127 aa, Zea mays
  Coding DNA Sequence Number=SeqID_38616
MAGRFGRGAERVGGKEVAPTSNSGGPEHGIAQEKTLSCPTRHGEAPRTGCRGRNDTESGSPPRGGFHNSSLPRRTAQEKLGVDVVESESGIVEEMATRRCVLGFPHQRHDGAGRKYGWRRSSFHRRR

SEQ ID NO: 80396 - protein, 428 aa, Zea mays
  Coding DNA Sequence Number=SeqID_38617
  Homolog annotation: Hit_ID=Q2QY81; Match level="QueryCoverage=75%, HitCoverage=90%, E-value=1e-144, Identity=77%"; Hit description =Expressed protein
  Pfam annotation: Domain name=WD40; Domain location=148-186; Score =20.4; E_value=0.0063; Accession=PF00400.22; Description=WD domain, G- beta repeat
MPSFPPPGAVTICEINRDLVAVDALSDDRAKDAYGDVLGMVFAPIPFQPEALLLASREPAAPAADQVEPADTVPTAGLAATISDFFRRMVFPPLDESYSNSIILVYQPNLLEEFDTQKVSWNPYKHCLAFVSGKNQVTVQDFEDSDAKEPCILTNDHQTDVKAVEWRPNSGKMIAVACKGGICLWSASYPGNVPFMKSGVTSSSFSAFPRGSGGQWILVDVLRGSSAELGANWDPEGRVALLSFSNSTTLGSIHFSSKPPSLDAHLLPVELPEISSLIVSRGIEKLAWDASGERLALSFRDGNEMYRGLIAIYDVRRSPLVSLSLVGFIRGPGEGAKPLAFAFHSKFKQGPLLSVWHPLLFLPFCSHVVLTVYAVLEQWLVLYVSADTSSSLTPVMFTWVSCVWDCAVKDCISSPASGNPPLTGTACI

SEQ ID NO: 80397 - protein, 271 aa, Zea mays
  Coding DNA Sequence Number=SeqID_38618
  Gene Ontology: Mol. function=molecular_function; Cellular component =nuclear pore; Biological process=regulation of nucleocytoplasmic transport
  Homolog annotation: Hit_ID=Q1SJS2; Match level="QueryCoverage=73%, HitCoverage=40%, E-value=2e-76, Identity=64%"; Hit description =Protein kinase; WD40-like
MSFEKLGPFVFLNYFTRGLGTPIRRGLSNISLVRWSPSGDYLLVAKFDGTFHFWETNTWTSEPWSSSNGYVSGANWDPEGRVALLSFSNSTTLGSIHFSSKPPSLDAHLLPVELPEISSLIVSRGIEKLAWDASGERLALSFRDGNEMYRGLIAIYDVRRSPLVSLSLVGFIRGPGEGAKPLAFAFHSKFKQGPLLSVWHPLLFLPFCSHVVLTVYAVLEQWLVLYVSADTSSSLTPVMFTWVSCVWDCAVKDCISSPASGNPPLTGTACI

SEQ ID NO: 80398 - protein, 143 aa, Zea mays
  Coding DNA Sequence Number=SeqID_38619
  Subcellular localization annotation: CTP_CleavageSite=89; ConfidenceScore=5.69e-01
MASNPLQPSFPWRHSSLSLLYMAPSSNSTFPGRAQGRRPASPSLFLPWPSHHFPSRSPLPSIVSSPETNPWPPSTLVLDPPRAASTDLRSSASSHQGAPSSLSSVVPADCSTKCAASRAMQQPIRDAVKTLGEKPPPFSMFIF

SEQ ID NO: 80399 - protein, 180 aa, Zea mays
  Coding DNA Sequence Number=SeqID_38620
MEGRGLRLGKWWLGHGKNREGEAGRRPWARPGKVELLLGAMYSREREEWRHGKLGCRGLLAMERGRRGRWSRLEQREYGVQGARRHGEREEIPAAGAIGEACLGACHGGASARRPNQGRWSSLPWAKKGRGGSRLGRRIEEEGLGRHGEEGSRAPCALPAATVRKKGTGKKKMAARGVDE

SEQ ID NO: 80400 - protein, 110 aa, Zea mays
  Coding DNA Sequence Number=SeqID_38621
MACTTDQCDLPHGLMELFPRCSLTVFGAAERQLDVGFGYMSQQGSSSGNNLALFSFDFLLDRYQNHVATTYDMQNVENLNAVQNVENLNAVRAMVGFGQLRMTSSTYLFI

SEQ ID NO: 80401 - protein, 164 aa, Zea mays
  Coding DNA Sequence Number=SeqID_38622
MHKYEEQSVPSGGTDAQGTSGSIHTRHLVCLFDVAVRKLWTITRAVAKTLPKNLIARTPVQGIFGPRLMELFPRCSLAVFGAAERQLDVGFGYTSQQGSSSGNNLALFSFDFLLDRYQNHVATAYDMQNVENLNAVQNVENLNAVRAMVGFGQLRMTSSTYLFI

SEQ ID NO: 80402 - protein, 393 aa, Zea mays
  Coding DNA Sequence Number=SeqID_38623
MRRKDGRYPPFGGLEGAESSPTRSKALPCGAGAGSRMSYQRAKGAGSHAGGMQPRQVGALLQLPTRPAWRPRPTRHATGAPTASCMQQHRHLRHHRASSIAEPIPRLEATQRTTQQRQHGAAINAAKNGPAVMTVAGGREQRSRRRPSSRPIRGQQENPLSRREDNAPEKRAMLRLRHNDRVSKGTGKGGYPEKDPSPGRNQAPSLPTDQRFEGWPPDGFGSRLRSRGPYTHYWSEVRRPAPRRVPRPPQATRAPRPLLIRGSKAGPRRVHSRLRRRARDDHGYVRYITKARAALPSSPETPCSAPIEGNMALSPLLLAERRCRGVYKKAEYVPDRPLALCGGSGAAVANPAPAEPLTASTYQPENLGPDRTPGLRPARMREQPDRPKHYARH

SEQ ID NO: 80403 - protein, 100 aa, Zea mays
  Coding DNA Sequence Number=SeqID_38624
MTTNPGPKNDVRRGRGRARTGGTGSSNRAGRELHATSARRDELGKEAERAQGSRPGAVVGTAVAARRAWPFNGPARHNYQAVVPCLGRGPAGHGPIIHRA

SEQ ID NO: 80404 - protein, 156 aa, Zea mays
  Coding DNA Sequence Number=SeqID_38625
  Subcellular localization annotation: CTP_CleavageSite=74; ConfidenceScore=5.22e-01
MELSASRVVLLFSPRSDHVSLRALPDSVSLACPLPNSWSRSHLAATAVPTTAPGLLPCARSASLPSSSLRAEVACSSRPARLLLPVPPVRARPRPRRTSFFGPGLVVMRLKVVVVPCVIKKSLASDEDEASSVMFTKCATKSSNKSLIVILVYAKI

SEQ ID NO: 80405 - protein, 429 aa, Zea mays
  Coding DNA Sequence Number=SeqID_38626
  Homolog annotation: Hit_ID=Q6ETX2; Match level="QueryCoverage=53%, HitCoverage=38%, E-value=1e-101, Identity=76%"; Hit description =Putative pentatricopeptide (PPR) repeat-containing protein
  Pfam annotation: Domain name=PPR; Domain location=158-192; Score =22.7; E_value=0.0013; Accession=PF01535.11; Description=PPR repeat
  Pfam annotation: Domain name=PPR; Domain location=194-228; Score =22.3; E_value=0.0018; Accession=PF01535.11; Description=PPR repeat
  Pfam annotation: Domain name=PPR; Domain location=98-132; Score=11.8; E_value=0.3; Accession=PF01535.11; Description=PPR repeat
  Pfam annotation: Domain name=Rieske; Domain location=233-329; Score =71.3; E_value=3.1e-18; Accession=PF00355.16; Description=Rieske [2Fe- 2S] domain
  Pfam module annotation: Pfam domain module=PPR::PPR::PPR::Rieske; Domain location=158-192::194-228::98-132::233-329
MESEIVRMFHPPIRQSEEAIATIVPRYTYSMRVLDERFIRILKIFKWGPDAEKALEVLMLRVDHWLVREVMKTDVGVNVKMQFFRWATKRRNYEHDTSTYMALIHCLEVVEQYGEMWKMIQEMNFSDVVRKLGNAKMVSKAIAISYHIKTRKCQPTAQAYNSMIIMLMHEGQYEKVHQLYNEMSTEGHCFPDTMTYSALIFAFCKLGRRDSAIQLLNEMKEIDKWARCYTAADPPRHDHDRLVGGFVQRLVHHPEQWVIFRGKDGRPGCVQNTCAHRACPLHLGSVNEGRIQCPYHGWEYSTDGKCEKMPSTKMLNVRIQSLPCFEQEGMIWIWPGDDPPKATIPSLLPPSGFIVHAERCVLLIIQQIVMELPVEHVLLLDNLLDLAHAPFTHTSTFAKGLECSKFGEVLNTCIWAPRVLNEDLRLVLG

SEQ ID NO: 80406 - protein, 84 aa, Zea mays
  Coding DNA Sequence Number=SeqID_38627
  Homolog annotation: Hit_ID=Q8S7E1; Match level="QueryCoverage=48%, HitCoverage=7%, E-value=1e-10, Identity=69%"; Hit description =Chlorophyllide a oxygenase, chloroplast precursor
MVWIWPGDDPPKATIPSLLPPSGFTVHAELFEAPLDEKEILLRYSSALVQGLICSWFHVGIKELAEVSFPRDDKQTEKTTLKVT

SEQ ID NO: 80407 - protein, 141 aa, Zea mays
  Coding DNA Sequence Number=SeqID_38628
MSTGIRGLVLKRPFILAPSSAATAVAVRRDGDGRRGSRDAREDMGARNWTETHRLALSTRGGEGPKSGEVDLGPPVKSGLVRGLGKLHGPLAEQAEALAQLGSGWSVLATVAEALAAMAGGIELAGAKERWLAGEGEREVK

SEQ ID NO: 80408 - protein, 46 aa, Zea mays
  Coding DNA Sequence Number=SeqID_38629
MSTGIRGLVLKRPFILAPSSAATAVAVRRDGDGRYKGSSSLISCEK

SEQ ID NO: 80409 - protein, 140 aa, Zea mays
  Coding DNA Sequence Number=SeqID_38630
  Subcellular localization annotation: CTP_CleavageSite=58; ConfidenceScore=5.01e-01
MGEASLGKAWEAPHDDRTLIFPWAASPSSPLSTRCSRPTVPCGSLGPRWGYVIGRPTRAAEEDDPWGPPVSGTVRTPGEAADVRVPRIGVTDEHTTEPVRLAHGPTGQRSRAKRADEAVLGRGDGTAGLRGLGYGPAQIP

SEQ ID NO: 80410 - protein, 120 aa, Zea mays
  Coding DNA Sequence Number=SeqID_38631
MCQPHRFGRVLVRDTDPGDPHVCRFTWSPHGTTDWRAPWVIFLSRTRQLQRTAESAGASPPRLRSVPAAPGKTSLYNPTTLPSRSHNPSGAERTAGTVGREHLADRERRLAAMGNQVRSS

SEQ ID NO: 80411 - protein, 200 aa, Zea mays
  Coding DNA Sequence Number=SeqID_38632
  Homolog annotation: Hit_ID=Q6QP51; Match level="QueryCoverage=45%, HitCoverage=37%, E-value=2e-17, Identity=62%"; Hit description =Putative growth-regulating factor 1
MDRQGRSDRSHFALPLTDLTGKQRRPPLSDCCATHQGEADNSQVQPHAQQEAPPRPTLGLGLRRRSPPRPTPGLNLSLGLGRRTPPRPTPGLGLNLGLGRWSPPRPTPGLGLNLGLGRNRVLARPQPRPQEESPPRPTLGSDRPRHEGYIITLPLASSGYGGTRPASPSRLAPVTSNDGSPRAPMTMVVLSPPTEARRRQ

SEQ ID NO: 80412 - protein, 157 aa, Zea mays
  Coding DNA Sequence Number=SeqID_38633
MKAKSHQQPIILRSTCKNYATSKAEYTNTQLDLPVTTLVPTITGMGDYVSGRVRDKVCGKLGLSGNLKREEPEPYVHANVTIGEVLEPYARGVVAVGGALGPCRSTPIRAAGTLLTSPCFRRGLRTAVVMGARGEPSLLVTGASLDGTPVLFPRSLS

SEQ ID NO: 80413 - protein, 220 aa, Zea mays
  Coding DNA Sequence Number=SeqID_38634
  Subcellular localization annotation: CTP_CleavageSite=56; ConfidenceScore=5.58e-01
MQGVTVQSPSTSSRGRIRPRHRLEASRSSSLLFEAPAFRRFATRRRRFGRASVPVPVGAVDDEVEVVSKVLRSRPKTKRAQIRLRPAQFRMASSKEDTMKSLVKVLVDCAEDATKSLRGLVDHALDHMHDEEILARTLFAMKEKLDLLHQDALEAKVQAFPEIAKYEGDDISVEPTSLSTPPTVTEPSVDEEEFYCPDVSDEWYFSDSDRSTRNSYWNIY

SEQ ID NO: 80414 - protein, 220 aa, Zea mays
  Coding DNA Sequence Number=SeqID_38635
  Subcellular localization annotation: CTP_CleavageSite=56; ConfidenceScore=5.61e-01
MQGVTVQSPSTSSRGRIRPRHRPEASRSSSLLFEAPAFRRFATRRRRFGRASVPVPVGAVDDEVEVVSKVLRSRPKTKRAQIRLRPAQFRMASSKEDTMKSLVKVLVDCDEDATKSLRGLVDHALDHMHDEEILARTLFAMKEKLDLLHQDALEAKVQAFPEIAKYEGDDISVEPTSPSTPPTVTEPSVDEEEFYCPDVSDEWYFSDSDRSTRNSYWNIY

SEQ ID NO: 80415 - protein, 73 aa, Zea mays
  Coding DNA Sequence Number=SeqID_38636
MSELQARDFHFAIIGSASIAFINDPIRELKALMPRTLFWIRLQSREHNDIARIARNFIIKMNLFVRQITIRVN

SEQ ID NO: 80416 - protein, 86 aa, Zea mays
  Coding DNA Sequence Number=SeqID_38637
MSELQAHDFHFAIIGSASIAFINDPIRELKALMPRTLFWIHLQSRGHNDIARIARNFIMKMNLFVRQITSRASPRIDQIPISQMWI

SEQ ID NO: 80417 - protein, 561 aa, Zea mays
  Coding DNA Sequence Number=SeqID_38638
  Subcellular localization annotation: CTP_CleavageSite=69; ConfidenceScore=5.15e-01
MNKDRQDAAQKRRAVIRLPDPRREAKRARRLPPPAVASRRWLRNRLRPDPARCRRARRQSSPAEPSLPRAKLRRSGSCLRRGNVLPTSARILAWTTISLVSSFFDRWYVARSGEGQMVVVPHAVATTASTAVVEVKRGAFCASGEISLAAAVKDEAGTMSRRLREASQQLSQQLSQQLSQAADFADRVASGALTVDVSAEVERLRAQHVDAVREKSAAESKNHRLAEKVAALEAEKTDLRRQLVEERREANQAIAEVQAAQVEAKLARAEGSLASQRAEEWEVERTRAQLVDSYRELGARTADFEVPDREAGLRFLEWLQEELLMERAEDVKDFGGLVDAPPEAAEGKPVLPSDAGEGPSNAPVPTVAGEDPVSAPVPTVEGAQEVVAEPAVKGPTAAAAAAPSQGFGPAHATATDSANFVAASIVVAENDSDDSVSKFFESDDSGSSVVWTEESSDEDLDYFAALDVAAAEASPRVMDAEVLPGPSAGRRRRRVVAKRRVSEVEGGRLRVDRAGKRELLSLPVGASVGEGELRSLFEGEELRIMLFNYREMGIIPKVEPM

SEQ ID NO: 80418 - protein, 560 aa, Zea mays
  Coding DNA Sequence Number=SeqID_38639
  Subcellular localization annotation: CTP_CleavageSite=69; ConfidenceScore=5.15e-01
MNKDRQDAAQKRRAVIRLPDPRREAKRARRLPPPAVASRRWLRNRLRPDPARCRRARRQSSPAEPSLPRAKLRRSGSCLRRGNVLPTSARILAWTTISLVSSFFDRWYVARSGEGQMVVVPHAVATTASTAVVEVKRGAFCASGEISLAAAVKDEAGTMSRRLREASQQLSQQLSQQLSQAADFADRVASGALTVDVSAEVERLRAQHVDAVREKSAAESKNHRLAEKVAALEAEKTDLRRQLVEERREANQAIAEVQAAQVEAKLARAEGSLASQRAEEWEVERTRAQLVDSYRELGARTADFEVPDREAGLRFLEWLQEELLMERAEDVKDFGGLVDAPPEAAEGKPVLPSDAGEGPSNAPVPTVAGEDPVSAPVPTVEGAQEVVAEPAVKGPTAAAAAAPSQGFGPAHATATDSANFVAASIVVAENDSDDSVSKFFESDDSGSSVVWTEESSDEDLDYFAALDVAAAEASPRVMDAEVLPGPSAGRRRRRVVAKRRVSEVEGGRLRVDRAGKRELLSLPVGASVGEGELRSLFEGEELRIMLFNYREMGIIPKVEP

SEQ ID NO: 80419 - protein, 139 aa, Zea mays
  Coding DNA Sequence Number=SeqID_38640
MPFANCNLADGEYVLIPEQGPIQEEDQEQASEAAIEDLPAPPAIEGKPRYGGYKCGHCTTAVGVSGALYAKAVRPGRERGIDGDGCHVWGRSTLTCRVFRFTLQGTMQDVVDGVTWPTTLPPGWTVEWDVAPAGEEHEE

SEQ ID NO: 80420 - protein, 58 aa, Zea mays
  Coding DNA Sequence Number=SeqID_38641
MGTVVMCGVGSTLTCRVFRFTLQGTMQDVVDGVTWPTTLPPGWTVEWDVAPAGEEPEE

SEQ ID NO: 80421 - protein, 170 aa, Zea mays
  Coding DNA Sequence Number=SeqID_38642
MGKPVPSLLMLLLSRGRVPLDSPTRWQDGRPSHSSNHFLQRTCKNYATSKAEYTNTQLDLPGQHGSSSLISCEKQTIRIEFLNLARLCIKPGLAFQSSGRQVLWCRLGCWIRGYLLSISLLRHEDVLSVSKVTVYRDAMNMVSSVVLNYDSVLIISKNSVKITVGCQLLF

SEQ ID NO: 80422 - protein, 166 aa, Zea mays
  Coding DNA Sequence Number=SeqID_38643
MGKPVPSLLMLLLSRGRVPLDSPTRWQDGRPSHSSNHFLQRTCKNYATSKAEYTNTQLDLPGQHGSSSLISCEKQTIRIEFLNLARLCIKPGLAFQSSGRQVLWCRLGCWIRGYLLSSSLLRHEDVLSVSKVTVYRDAMNMVSSVVLNYDSVLIISKNSVKITVGC

SEQ ID NO: 80423 - protein, 157 aa, Zea mays
  Coding DNA Sequence Number=SeqID_38644
MPLHHLRASQLLEETPTETGTMTTPVAVRAMARSGQRSQSRRDGSGVADGLDLKHYPRRSTSSARGVIVSPVGEGNPRLSSMVNLAAVLNIELDHALDELGKVRAEVVELCVECAACHYLDGGSPALVGIQHPYRSPPRGRFDYGTPDCRTQIDLDP

SEQ ID NO: 80424 - protein, 63 aa, Zea mays
  Coding DNA Sequence Number=SeqID_38645
MPLHHLRASQLLEETPTETGTMTTPVAVRAMARSGIQHPYRSPPRGRFDYGTPDCRTQIDLDP

SEQ ID NO: 80425 - protein, 217 aa, Zea mays
  Coding DNA Sequence Number=SeqID_38646
MAHTRLEAVLETSERWQIADAALLRWRSKLKRVARYGFAQTRCAASGMISTSSIGHGSESGILGLGGGEAPQQQDPPSLKSWNRLLAPRVEEIMLPMAIDYFCKNEKATIYQMLWKGLSMALRGSIKDRIRHRDSYKSDDDDDEPSNRLLLDMHELSKRGGHLPQQPASSSALVARRRRRRRCLRGHHHEQLRRHHQEQHAGNHGAAASHRFVPQNQ

SEQ ID NO: 80426 - protein, 236 aa, Zea mays
  Coding DNA Sequence Number=SeqID_38647
  Homolog annotation: Hit_ID=Q6K9C5; Match level="QueryCoverage=40%, HitCoverage=28%, E-value=2e-21, Identity=71%"; Hit description =Putative COL1 protein
MPPRRRAWAHRQARRRRAPRGGARGRRASGFAEWMSASQEAQSAAASARHVTTVGVCSQTSQSQTRAWRDPAPCACASHPAHRNARVRAAVEARRLDAARVMRAAKRRSRVVRDALGLRPLNSILSTGTQWLLRPDPLCCKRHDQHASSIGHGSESGILGLGGGGACLEPVVSVNLQSAASRCGGATSIGRALLSEFRDSQPQDPPSSVKAGIVFSPHGYSSEDYLPRVDTGIQLR

SEQ ID NO: 80427 - protein, 259 aa, Zea mays
  Coding DNA Sequence Number=SeqID_38648
  Gene Ontology: Mol. function=peroxidase activity; Cellular component =intracellular; Biological process=regulation of transcription, DNA -dependent
  Homolog annotation: Hit_ID=Q8L4X3; Match level="QueryCoverage=66%, HitCoverage=55%, E-value=4e-52, Identity=60%"; Hit description =CONSTANS-like protein
  Pfam annotation: Domain name=zf-B_box; Domain location=2-40; Score =20.2; E_value=0.00094; Accession=PF00643.14; Description=B-box zinc finger
  Pfam annotation: Domain name=zf-B_box; Domain location=41-83; Score =34.5; E_value=3.6e-07; Accession=PF00643.14; Description=B-box zinc finger
  Pfam module annotation: Pfam domain module=zf-B_box::zf-B_box; Domain location=2-40::41-83
MTRAGVEAARLYCRTDAAFLCAGCDAQAHGAGSRHARVWLCEVCEHTPTVVTCRADAAALCASCDADIHSANPLARRHERLHVAPFFGALADAPKPFASAASPKATDDDGSNEDEAASWLLPEPDHGQKEGATTEVFFADSDPYLDLDFARSMDDIKTIGFQQSRPPELDLAGTKLFYSAGWQDALREELLAGEKVPVERVKGHGHAATSSWRPAAKLSQPHELASAISAWACWQENWQNGVSSASTQNMVTCKFNGSP

SEQ ID NO: 80428 - protein, 295 aa, Zea mays
  Coding DNA Sequence Number=SeqID_38649
  Gene Ontology: Mol. function=peroxidase activity; Cellular component =intracellular
  Homolog annotation: Hit_ID=Q8L4X3; Match level="QueryCoverage=51%, HitCoverage=48%, E-value=7e-33, Identity=56%"; Hit description =CONSTANS-like protein
  Subcellular localization annotation: CTP_CleavageSite=4; ConfidenceScore=5.07e-01
MPLAAQRVWAKKPLSARAEDTVQLLFAVRVSNSAFGTHDHEKSSLRRTAPGRATRGSGSARFASTRRRWSRAARTLPRSAPPATPTSTRRTRSRAAHERLHVAPFFGALADAPKPFASAASPKATDDDGSNEDEAASWLLPEPDHGQKEGATTEVFFADSDPYLDLDFARSMDDIKTIGFQQSRPPELDLAGTKLFYSAGWQDALREELLAGEKVPVERVKGHGHAATSSWRPAAKLSQPHELASAISAWACWQENWQNGVSSARSFPWVIGDRVTIAISSEGRPMGSTCVSQGD

SEQ ID NO: 80429 - protein, 147 aa, Zea mays
  Coding DNA Sequence Number=SeqID_38650
MPGDSVEDEADALGPPARETGVRRERDGWPMGPMWQKANGAEHTRLAIGSRCAVSTAVRTQAVNDRWAPGMGFAPIPAVTEPPQSLGPPTVILVHRTSDNPAGAPDHLTSSVSVFFTLPKSVSPVTQILQHIGGTRMRKQLQQLILD

SEQ ID NO: 80430 - protein, 110 aa, Zea mays
  Coding DNA Sequence Number=SeqID_38651
MGFAPIPAVMEPPKSLGPPTVILVHRTSDNPAGAPDHLTSSDEQATEDPGAQQIEVAEQELIEDALIEIAMVQYLQKIAGALNLTAGDSRAWIRASAAICARWHADNFAG

SEQ ID NO: 80431 - protein, 406 aa, Zea mays
  Coding DNA Sequence Number=SeqID_38652
  Gene Ontology: Mol. function=structural constituent of ribosome; Cellular component=intracellular; Biological process=tricarboxylic acid cycle
  Homolog annotation: Hit_ID=Q84VR8; Match level="QueryCoverage=79%, HitCoverage=93%, E-value=1e-168, Identity=84%"; Hit description =Chimeric SDH2-RPS14 protein
  Pfam annotation: Domain name=Fer2; Domain location=63-128; Score =26.7; E_value=8.3e-05; Accession=PF00111.17; Description=2Fe-2S iron- sulfur cluster binding do
  Pfam annotation: Domain name=Ribosomal_S14; Domain location=295-349; Score=95.0; E_value=2.3e-25; Accession=PF00253.11; Description =Ribosomal protein S14pS29e
  Pfam module annotation: Pfam domain module=Fer2::Ribosomal_S14; Domain location=63-128::295-349
  Subcellular localization annotation: CTP_CleavageSite=26; ConfidenceScore=5.44e-01
MAAAALLRRSPAARALLSPALSSRLVASKPHSSSPTQPPPEAKGASSTKTFSIYRWDPDSPSTKPHLRDYQVDLSDCGPMVLDALLKIKNEQDPSLTFRRSCREGICGSCAMNIDGDNGLACLTKISSASSASTVSPLPHMFVIKDLVVDMTNFYNQYKSVEPWLKRKDPPPQLGKEVPQTKADRAKLDGMYECILCACCSTSCPSYWWNPEEYLGPAALLHANRLPLWGTLMKPKPNMFMHLQARGYHGVSEKRNLRDHKRRLLAEKFELRGKLYKAVCRDPDLPLDMREKFRYKLSKLPRNSSMTRLRNRCIFTGRSRAVYKKFRMSRIVFRTLANKGELMGVKKASWWIQDSRDQFTKERLDAINDEFKLYRCHTIKNCTHACPKGLNPAKQIDTIKKLQLDA

SEQ ID NO: 80432 - protein, 121 aa, Zea mays
  Coding DNA Sequence Number=SeqID_38653
MTAPRTTRPVALTLRRDRRHLWQEKRATLRLRHNDRVKKGSKAGPSEGFNSRLRALGLRAHYWSEAGPRRVHNRLRRRARDDPGIPSEGGIEPSDPVKRGPGPANHPQVLLERASGPLADP

SEQ ID NO: 80433 - protein, 51 aa, Zea mays
  Coding DNA Sequence Number=SeqID_38654
  Homolog annotation: Hit_ID=Q75LL8; Match level="QueryCoverage=90%, HitCoverage=39%, E-value=5e-18, Identity=93%"; Hit description =Expressed protein
  Pfam annotation: Domain name=DUF423; Domain location=1-51; Score= -45.2; E_value=0.052; Accession=PF04241.6; Description=Protein of unknown function (DUF423)
MAFPFGGLLTAGIVLFSGTCYTVAYLEDMKFSSPAPLGGFAFIAAWASLLF

SEQ ID NO: 80434 - protein, 207 aa, Zea mays
  Coding DNA Sequence Number=SeqID_38655
  Homolog annotation: Hit_ID=Q75LL8; Match level="QueryCoverage=40%, HitCoverage=61%, E-value=2e-31, Identity=81%"; Hit description =Expressed protein
  Pfam annotation: Domain name=DUF423; Domain location=58-178; Score =19.8; E_value=2.4e-07; Accession=PF04241.6; Description=Protein of unknown function (DUF423)
MWSPIDLDLAELLLEGFVKRTSDRELVRPPAATPQKEVLVHMAMGGFVMHYGVAEAQLGLLIAILMLIPGLPKMDSLVNALKLIQPITKRPNVVWHTASLYHLVHTAVLLGTPITKRPDVVPVLHASIFLLFGGLLTAGIVLFSGTCYTVAYLEDRKFSSPAPLGGFAFIAAWASLLYDILVENLMRTRGSCMSSGRRKIIEDMSLI

SEQ ID NO: 80435 - protein, 207 aa, Zea mays
  Coding DNA Sequence Number=SeqID_38656
  Homolog annotation: Hit_ID=Q75LL8; Match level="QueryCoverage=40%, HitCoverage=61%, E-value=3e-31, Identity=80%"; Hit description =Expressed protein
  Pfam annotation: Domain name=DUF423; Domain location=58-178; Score =18.2; E_value=3.2e-07; Accession=PF04241.6; Description=Protein of unknown function (DUF423)
MWSPIDLDLAELLLEGFVKRTSDRELVRPPAATPQKEVLVHMAMGGFVMHYGVAEAQLGLLIAILMLIPGLPKMDSLVNALKLIQPITKRPNVVWHTASLYHLVHTAVLLGTPITKRPDIVPVLHASIFLLFGGLLTAGIVLFSGTCYTVAYLEDRKFSSPAPLGGFAFIAAWASLLYDILVENLMRTRGSCMSSGRRKILEDMSLI

SEQ ID NO: 80436 - protein, 207 aa, Zea mays
  Coding DNA Sequence Number=SeqID_38657
  Homolog annotation: Hit_ID=Q75LL8; Match level="QueryCoverage=40%, HitCoverage=61%, E-value=2e-31, Identity=81%"; Hit description =Expressed protein
  Pfam annotation: Domain name=DUF423; Domain location=58-178; Score =19.8; E_value=2.4e-07; Accession=PF04241.6; Description=Protein of unknown function (DUF423)
MWSPIDLDLAELLLEGFVKRTSDRELVRPPAATPQKEVLVHMAMGGFVMHYGVAEAQLGLLIAILMLIPGLPKMDSLVNALKLIQPITKRPNVVWHTASLYHLVHTAVLLGTPITKRPDVVPVLHASIFLLFGGLLTAGIVLFSGTCYTVAYLEDRKFSSPAPLGGFAFIAAWASLLYDILVENLMRTRGSCMSSGRRKILEDMSLI

SEQ ID NO: 80437 - protein, 95 aa, Zea mays
  Coding DNA Sequence Number=SeqID_38658
  Gene Ontology: Mol. function=catalytic activity
  Homolog annotation: Hit_ID=Q2QNG7; Match level="QueryCoverage=40%, HitCoverage=9%, E-value=2e-12, Identity=89%"; Hit description=ATP -citrate synthase, putative, expressed
MMFWMVEKIPPEDRATCPSTATPTMESKLKASRMHIYVRRGGPNYQSGLAKMRKLGAELGVPIEAGNYARLTHLATDLPWCDDPINIVVLAIDSY

SEQ ID NO: 80438 - protein, 212 aa, Zea mays
  Coding DNA Sequence Number=SeqID_38659
  Homolog annotation: Hit_ID=Q10BX5; Match level="QueryCoverage=60%, HitCoverage=34%, E-value=6e-08, Identity=37%"; Hit description =Expressed protein
  Pfam annotation: Domain name=DUF569; Domain location=1-150; Score =28.8; E_value=6e-09; Accession=PF04601.4; Description=Protein of unknown function (DUF569)
MDQIFDENHVRLRSRVRGTYLYADEDGVGVSLSRRRASLNAAWQVHLVQNFVLFRSAAYGRYLAVSREMAPPGHRGLRVVQRDYDELVLYAVAWRPIGAPLTVDDEAEADVVLRYGSTRYLRANGRHRRWHTGVTVDDNGGVRTTMMLAYQLGETISVGGERGVIGIALCVQAGNCARLTPLVTDLPWCDDPMNIVVLATDSYGESCFSVAS

SEQ ID NO: 80439 - protein, 99 aa, Zea mays
  Coding DNA Sequence Number=SeqID_38660
  Homolog annotation: Hit_ID=Q6QP57; Match level="QueryCoverage=26%, HitCoverage=8%, E-value=2e-07, Identity=96%"; Hit description =Putative zinc finger protein
MAQSTVGSLRAIGAPDMSGAHRTVRCPLLAIGLATCPAQIARPWPGRPLAHRTVRCTPDSPVNYSPEKEAHVKEGVLDKESLYLKTGGYKKLEWLSEGF

SEQ ID NO: 80440 - protein, 378 aa, Zea mays
  Coding DNA Sequence Number=SeqID_38661
  Gene Ontology: Mol. function=protein serine/threonine kinase activity; Cellular component=cytoplasm; Biological process=protein amino acid phosphorylation
  Homolog annotation: Hit_ID=Q84RS1; Match level="QueryCoverage=67%, HitCoverage=47%, E-value=2e-86, Identity=62%"; Hit description=ZIK1 protein
  Pfam annotation: Domain name=Pkinase; Domain location=24-253; Score =76.2; E_value=1e-19; Accession=PF00069.15; Description=Protein kinase domain
  Pfam annotation: Domain name=Pkinase_Tyr; Domain location=50-251; Score=-77.7; E_value=1.1e-07; Accession=PF07714.7; Description =Protein tyrosine kinase
  Pfam module annotation: Pfam domain module=Pkinase::Pkinase_Tyr; Domain location=24-253::50-251
MDTSGAGHRVVSPCALDPNLPSLIQRSRSLDNVSRERTLPLGPIASVYAFRVTRTWDLYDPGDDKKKLLHSDLVLIDEEVTNDWMILRYRIKHKKVDIRALKKWSRQILSGLVYLHNHDPPVIHRDLKCDNIFVNGNQGEVKIGDLGLATILDNACSAHSIIGTPEFMAPELYDEEYNELVDIYAFGMCLLELVTFEYPYCECSNAAQIYRKGEKPGSLAKIGDPEVKLFIEKCIAKVTKRLSANELLMDPFLLDVSDEKIFYPVHPNINTTDTGSPKPSSSFRYDGVASSAGRHDRSGHAQNIHFPFDSEADTSISVATEMVVQLDLTDQDQRSQLTTKGMKLLTLRPIVQKGVLDKESLYLKTGGYKKLEWLSEGF

SEQ ID NO: 80441 - protein, 432 aa, Zea mays
  Coding DNA Sequence Number=SeqID_38662
  Gene Ontology: Mol. function=nucleotidyltransferase activity; Cellular component=cytoplasm; Biological process=metabolic process
  Homolog annotation: Hit_ID=Q9M4X0; Match level="QueryCoverage=99%, HitCoverage=100%, E-value=0.0, Identity=84%"; Hit description=UDP -glucose pyrophosphorylase
  Pfam annotation: Domain name=UDPGP; Domain location=23-400; Score =758.9; E_value=3.2e-225; Accession=PF01704.8; Description=UTP- -glucose-1-phosphate uridylyltransferase
MADEKLAKLREATAGLTQISENEKSGFLSLVGRYLSGDEEHIEWAKIHTPTDEVVVPYDTLESPPEGTEATKKLLDKLAVLKLNGGLGTTMGCTGPKSVIEVRNGFTFLDLIVIQIESLNKKYGSNVPLLLMNSFNTHDDTLKIVEKYTNSSIEIHTFNQSQYPRVVADEFLPWPSKGKTDKDGWYPPGHGDIFPSLMNSGKLDLLLSQVTPKTLADVKGGTLISYEGRVQLLEIAQVPDAHVNEFKSIEKFKIFNTNNLWVNLKAIKRLVEADALKMEIIPNPKEVDGVKVLQLETAAGAAIRFFDHAIGINVPRSRFLPVKATSDLQLVQSDLYTLVDGFVTRNSARTNPSNPSIELGPEFKKVGSFLGRFKSIPSIVELDSLKVSGDVWFGSGIVLKGKVTITAKPGVKLEIPDGAVIGNKDISGPEDL

SEQ ID NO: 80442 - protein, 51 aa, Zea mays
  Coding DNA Sequence Number=SeqID_38663
MDTALPPEPHLSRTTSQLPPPALSRRQGKVTITAKPGVKLEIPDGAVIGNK

SEQ ID NO: 80443 - protein, 320 aa, Zea mays
  Coding DNA Sequence Number=SeqID_38664
  Subcellular localization annotation: CTP_CleavageSite=30; ConfidenceScore=5.54e-01
MAGSAAPPPCLARLGRPTAGSAAPCAAPCPAGSAAPALRRFGRPALASPAARSPARAPPRAGSTALGPMARLRHTARKSVIPFLPSRLAERPLRRPVAGQSSHLERLHHRLREEQERRRQEQQSSSLSLHQEIESVRSCSPVLPLEPPPAPPLGAPASGVAAGGDPDDGDGDDSSSHDTDFSANPEPEGWVARPITRDAARGCHFHDALDTLLRRAFDRHTWSVEYRCVVYQHSRGVYPDRWEATCLVRCPEDSLQGAEACSEHYSISERDSAEAAMQDAARRALSHYCSVFGGAADGLDLKYYPRRSSGSNRRRDCLTC

SEQ ID NO: 80444 - protein, 94 aa, Zea mays
  Coding DNA Sequence Number=SeqID_38665
MAVVGTARGKGLLRRAWCFLAVFGDGGDGAHGFDREVVQCSLLGPRPSLAEIDSGMTGWGQMDAKILRRNFIIELLSYEDNLCRYAIPANIQQS

SEQ ID NO: 80445 - protein, 373 aa, Zea mays
  Coding DNA Sequence Number=SeqID_38666
  Homolog annotation: Hit_ID=Q5NBJ1; Match level="QueryCoverage=13%, HitCoverage=5%, E-value=8e-08, Identity=64%"; Hit description=Alpha -glucosidase-like
  Subcellular localization annotation: CTP_CleavageSite=25; ConfidenceScore=5.41e-01
MEVIGRFLGMPASAVAIGSISVGVTARSRGSFASLATTACPAVVVLVLDQILLSGWGGTSQACGGIGVGASAGPLTLSCGVKGELAGESKGGGIDVRLQRIKAGDWGGTRAVVGGHGCARWRRVRGWRRAWPRAAARMATGVGAGCRGGCAHGRVPVAAANDGLGPSREHCTTSLSNPCAPSPPSPKTAKKHHARLNNPFPRAVPTTAIRDDCDVALHLSFTSTSKLAHTHDFPVDAASRSLRLRRSLLSAELLTAVEVMEDEHQKQEVYNQHVRNEEEEEILIDMNDEIYDDADAGEEEGDDDDDDAEEEEGEESEGNHVSKAQKTNRGIKRLKGGSQSSPSKDKAKRGKCAGCWKYFKEIHVQSKKEFGVM

SEQ ID NO: 80446 - protein, 326 aa, Zea mays
  Coding DNA Sequence Number=SeqID_38667
  Gene Ontology: Mol. function=receptor activity; Cellular component =integral to membrane; Biological process=protein amino acid phosphorylation
  Homolog annotation: Hit_ID=Q6ZII6; Match level="QueryCoverage=98%, HitCoverage=52%, E-value=1e-145, Identity=83%"; Hit description =Receptor-like protein kinase-like protein
  Pfam annotation: Domain name=LRRNT_2; Domain location=270-310; Score =15.2; E_value=0.022; Accession=PF08263.3; Description=Leucine rich repeat N-terminal domain
MATIKLDFSLRYWTTLILTGTLFSSLLLGWSSDDEKTFAEALVFVQDSSLSVCFHSTGHGDPSILSIEVLQIDDDAYNFGPPREKGTVLRAVKRLKCGSGKPAFDEDLNGIHWGGDRFWLGLQTLSSSSDDQSISSENVIAETLLAPNFYPQGIYQSAIVGTDRQPSLSFEMDVTPNKNYSVWLHFAEIDNGVTAEEQRVFDVLINGDTAFKDIDIIRMTGERFTALVLNKTVAVSGITLKIILQPVKGTRAIINAIEVFEIIPAEKKTLPQEVSALRTLKGSLGLPLRFGWNGDPCVPQQHPWSGVDCQFDSTKGNWIIDGLYVL

SEQ ID NO: 80447 - protein, 721 aa, Zea mays
  Coding DNA Sequence Number=SeqID_38668
  Gene Ontology: Mol. function=protein binding; Biological process =protein amino acid phosphorylation
  Homolog annotation: Hit_ID=Q6ZII6; Match level="QueryCoverage=49%, HitCoverage=55%, E-value=1e-179, Identity=86%"; Hit description =Receptor-like protein kinase-like protein
  Pfam annotation: Domain name=IQ; Domain location=585-605; Score=24.7; E_value=0.00032; Accession=PF00612.17; Description=IQ calmodulin -binding motif
MRWRSPAVLRLQLWLLAVSASLAALGVLAADLSKEPFTIRISCGSFDDVRTEPTNTLWYRDFGYTGGRFANATRPSFIVPPLKTLRYFPLSDGPENCYNINNVPNGHYQVRLFFALLDNPNLDSEPIFDVSVEGTLFSSLLLGWSSDDEKTFAEALVFVQDSSLSVCFHSTGHGDPSILSIEVLQIDDDAYNFGPPREKGTVLRAVKRLKCGSGKPAFDEDLNGIHWGGDRFWLGLQTLSSSSDDQSISSENVIAETLLAPNFYPQGIYQSAIVGTDRQPSLSFEMDVTPNKNYSVWLHFAEIDNGVTAEEQRVFDVLINGDTAFKDIDIIRMTGERFTALVLNKTVAVSGITLKIILQPVKGTRAIINAIEVFEIIPAEKKTLPQEEAPGPVFLPIDTPLQSLTDLATITSGIGYLGFRSDPMASAANFAATSWQPASPSPWTAPHVTFVTPSWQPTSPSPWAAPHATFVTPSWQPASLSPWAASPANFVTTSWTPACPSPGITPNFITSSSLTASPSPWATPLGAATAQQSSAPSMGDLWTNIRADLAKMQATLQKVEQGLLQIKVAVQHEQHQLALSTRLQTLAAVGIQAAARGFLARQRVREMRRQMLEAALVTVDLGTRGRDLALSDGHQQRLRAAISKCGHGTFPAGDELQFYGSSGKEGTPLVIGKGALFSATTFRYRPPRGRLRWLLLRPIPASVMLQLEDELLVQEGCSARA

SEQ ID NO: 80448 - protein, 170 aa, Zea mays
  Coding DNA Sequence Number=SeqID_38669
MARTRKTARKSTRPFGVPRHQLAPRHEGSSSGSNDPIGDLEARVEQLRSELRHRNRAREKDNQRIAELSADVSCLQYEISERDSAIDWAVNSRSITLDREAKARAHVAELSAALDSLQVYCNTLHEEVHVLYARLHPNVPSDVAAMGAGPSGTTNEGPDGELDLFRPLLP

SEQ ID NO: 80449 - protein, 1968 aa, Zea mays
  Coding DNA Sequence Number=SeqID_38670
  Gene Ontology: Mol. function=catalytic activity; Cellular component =vacuolar membrane; Biological process=metabolic process
  Homolog annotation: Hit_ID=Q41743; Match level="QueryCoverage=93%, HitCoverage=79%, E-value=0.0, Identity=93%"; Hit description=Acetyl -coenzyme A carboxylase
  Pfam annotation: Domain name=ACC_central; Domain location=482-1195; Score=1228.7; E_value=0; Accession=PF08326.2; Description=Acetyl-CoA carboxylase, central regio
  Pfam annotation: Domain name=Biotin_carb_C; Domain location=170-277; Score=166.3; E_value=7.9e-47; Accession=PF02785.9; Description =Biotin carboxylase C-terminal domain
  Pfam annotation: Domain name=Biotin_lipoyl; Domain location=415-481; Score=40.3; E_value=6.6e-09; Accession=PF00364.12; Description =Biotin-requiring enzyme
  Pfam annotation: Domain name=Carboxyl_trans; Domain location=1294 -1852; Score=920.2; E_value=9e-274; Accession=PF01039.12; Description= Carboxyl transferase domain
  Pfam module annotation: Pfam domain module=ACC_central::Biotin_carb _C::Biotin_lipoyl::Carboxyl_trans; Domain location=482-1195::170 -277::415-481::1294-1852
MDQLLVKGQDIKQRWQRYFDILFNGENETMDTQLDDSFDDLNRCFVRRIQESEVKEALKRMKGGRARMVMERYKEQKDLHMVFTTLESKGFYCTWFSCRMRCDFGTTISEDGDFLIILFPKLSSTYVEIRRFYGMDYGGGYDIWRKTAALAAPFNFDEVDSLWPKGHCVAVRITSEDPDDGFKPTGGKVKEISFKSKPNVWAYFSVKSGGGIHEFADSQFGHVFAYGLSRPAAITNMSLALKEIQIRGEIHSNVDYTVDLLNASDFRENKIHTGWLDTRIAMRVQAERPPWYISVVGGALYKTVTTNAATVSEYVSYLTKGQIPPKHISLVNSTVNLNIEGSKYTIETVRTGHGRYKLRMNDSTVEANVQSLCDGGLLMQLDGNSHVIYAEEEAGGTRLQINGKTCLLQNDHDPSKLLAETPCKLLRFLVADGAHVGADVPYAEVEVMKMCMPLLSPASGVIHCMMSEGQALQAGDLIARLDLDDPSAVKRAEPFDGMFPLMDLPVAASSQVHKRYAASLNAARMVLAGYEHNINEVVQDLVCCLDNPELPFLQWDELMSVLATRLPRNLKSELEDKYKEYKLNFYHGKNKDFPSKLLRDIVEENLAYGSEKEKATNERLVEPLMNLLKSYEGGRESHAHFVVKSLFEEYLTVEELFSDGIQSDVIETLRHQHSKDLQKVVDIVLSHQGVRNKAKLVTALMEKLVYPNPGAYRDLLVRFSSLNHKRYYKLALKASELLEQTKLSELCSSIARSLSDLGMHKGEMTIKDSMEDLVSAPLPVEDALISLFDYSDPTVQQKVIVTYISRLYQPHLVKDSIQMKFKESGAIVFWEFSEGHVDTRNGQGAILGGKRWGAMVVLRSLESASTAIMAALKDSVQYNNSEVNTMHIVLLNAETESNISGTSDDQAQHRMEKLTKILKDSSVASDLQAAGLKVISCIVQRDAGRMPMRHTFLWFDEKNCYEEEHILRHVEPPLSALLELGKLKVKGYNEMKYTPSRDRQWHIYTLRNTENPKMLHRVFFRTIVRQPNAGNKFTSAQVSDTGLGCPEESLSFTSNSILRSLMTAIEELELHAIRTGHSHMFLCILKEQKLLDLVPFSGSTIVDVGQDEATACSLLRSMALKIHELVGARMHHLSVCQWEVKLKLDCDGPASGTWRVVTTNVTSHTCTIDIYREVEDTESQKLLYHSATSSAGPMHGVALNNPYQPLSVIDLKRCSARNNRTTYCYDFPLAFETALQKSWQSNCSSVPEGSENSKSYVKSTELVFAEKHGSWGTPIIPMERPAGLNDIGMVAWILEMSTPEFPNGRQIIVVANDITFRAGSFGPREDAFFEAVTNLACERKLPLIYLAANSGARIGIADEVKSCFRVGWSDERSPERGFQYIYLTEEDYARISSSVIAHKLQLDNGEIRWIIDSVVGKEDGLGVENIHGSAAIASAYSRAYEETFTLTFVTGRTVGIGAYLARLGIRCIQRLDQPIILTGFSALNKLLGREVYSSHMQLGGPKIMATNGVVHLTVSDDLEGVSNILRWLSYVPANIGGPLPITKPLDPPDRPVAYIPENTCDPRAAIRGVDDSQGKWLGGMFDKDSFVETFEGWAKTVVTGRAKLGGIPVGVIAVETQTMMQLIPADPGQLDSHERSVPRAGQVWFPDSATKTAQALLDFNREGLPLFILANWRGFSGGQRDLFEGILQAGSAIVENLRTYNQPAFVYIPMAGELRGGAWVVIDSKINPDRIECYAERTAKGNVLEPQGLIEIKFRSEELQDCMGRLDPELINLKAKLQDAKHGNGSLPDIESLQKSIEARTKQLLPLYTQIAVRFAELHDTSLRMAAKGVIKKVVDWEESRSFFYKRLRRRISEDLLAKEIRRIIGDNFTHQSAMELINEWYLASQATTGSTAGWDDDDAFVAWKDSPENYKGYIQELRAQKVSQSLSDLADSSSDLQAFSQGLSTLLDKMDPSQRVKFVQEVKKVLG

SEQ ID NO: 80450 - protein, 446 aa, Zea mays
  Coding DNA Sequence Number=SeqID_38671
  Homolog annotation: Hit_ID=Q1S9P8; Match level="QueryCoverage=46%, HitCoverage=54%, E-value=3e-40, Identity=38%"; Hit description =Endonuclease/exonuclease/phosphatase
MVYCYTHTKLKPKLDQGQGSRGVAGVCQRGLEEPAFLIREASAPQELVREEEEWRKRQKPAFFSGKRGGMEETPGSKRKSSRPAARKDKRHRDEIRKGNWDSESLANQHMLVQHSLVPSPGTRRRVALDVVGLSESEKRKFWEDLDDMVRTVPTNENLFIDLNGHVGSKNVGYELAHGGFGYGSRNQEEDILDFAVAYNLVIANTFFRNRDSHLVTFSSGHRSSQIDFVLTRRKDNQACLDCKVILRESVVPQHNLVVANFRFRISTHRVKQVKIARTKWWELKGERSKVFRERVFVEGAWSEEEDANIMWVKMATCIRKVASEVFRVTKVSGGESKDTWWWTEDVQKAIKEKKECYRSLFHDRSAFNIERYKVAKKTTKRAVSEAKGRAYDDLYQRLSTKKGEKDVYKIARIQERETRDLNQVKCIKDEMDQLLVKGQDIKQRWQ

SEQ ID NO: 80451 - protein, 85 aa, Zea mays
  Coding DNA Sequence Number=SeqID_38672
MGCAACHLRHAILATGVPISMGSIACQFCHHILDADMPIFRDNAKFRNIIFVDSVSVPMGDATRGNHGSTITSSIDGGLVDQHKG

SEQ ID NO: 80452 - protein, 97 aa, Zea mays
  Coding DNA Sequence Number=SeqID_38673
MGLTQLKGKCIAQPSQDNRDHMVKKLETGITVACTTSLEENVKDLRIAMRREQNMKFNTSSKSLNHASTKGNIQGIKELSCAEYQSLQHGGKSKDVT

SEQ ID NO: 80453 - protein, 214 aa, Zea mays
  Coding DNA Sequence Number=SeqID_38674
  Homolog annotation: Hit_ID=Q75KQ9; Match level="QueryCoverage=38%, HitCoverage=12%, E-value=3e-36, Identity=95%"; Hit description =Expressed protein
MDEKVDLVEVLTRQVENLQRDTLFVERDELRKDIEQLCMQQAGPGYVSVATRMLTQRTAALEQDIENLQKKLGGCLRENQNLQEELAEAYRIKSQLAELHGAALSKLLKGVKCNQSCSTTTPGRLGIQDNNIGSGGVWGDDALKIGARVMEVGGGWGIVTQGSRVQVDGVCWSGAPVRRLGARWQCPPNSHCPWQRPKGISLCGSIAVLTLAGT

SEQ ID NO: 80454 - protein, 140 aa, Zea mays
  Coding DNA Sequence Number=SeqID_38675
  Homolog annotation: Hit_ID=Q75KQ9; Match level="QueryCoverage=56%, HitCoverage=11%, E-value=1e-35, Identity=96%"; Hit description =Expressed protein
MDEKVNLVEVLTRQVENLQRVISGSSSSLRAFLFNDFIIVYVLVRDELRKDIEQLCMQQAGPGYVSVATRMLTQRTAALEQDIENLQKKLGGCLRENQNLQEELAEAYRIKSQLAELHGAALSKVSHFDLKYVAILFNKL

SEQ ID NO: 80455 - protein, 123 aa, Zea mays
  Coding DNA Sequence Number=SeqID_38676
MAGAEGLAWSSSARGKKGCPRPWKKKAQGAWNDCAGEGRCPWEGAAAWRNGARRPWSFCPCARTGNREKRLLCKGGRPGGEEGRRAHGLWTPWPWLLAKQGETGGGLGVHGRSVGKGRKKTAG

SEQ ID NO: 80456 - protein, 122 aa, Zea mays
  Coding DNA Sequence Number=SeqID_38677
MAEAEGLAWSSSARGKKGCPRPWKKKAQGAWNDCAGEGRCPWEGAAAWRNGARRPWSFLPLRTYRKQREEAAVQRRPDQGVKKGAEHMGSGRHGRAAGQAGRKQGRAGRPWQERRQGRRDCC

SEQ ID NO: 80457 - protein, 40 aa, Zea mays
  Coding DNA Sequence Number=SeqID_38678
MAQGPSLVRARAGEPPSPMANALLRLKWVKNIIMPLVIGV

SEQ ID NO: 80458 - protein, 163 aa, Zea mays
  Coding DNA Sequence Number=SeqID_38679
MEEGCCTLAEEVAGDVAQGARDPSPEQGVGHGRRRLTSSSSNQGRALRHGRSRRARVVELGQGEKGVPAPMEEEGTGSLERLRRGGTLSMGGSCCLEEWSSAAMEFLPLRTYRKQREEAAVQRRPTWGRKKGAEHMGSGRHGRGCWPSGEKHWEGWASMAGAS

SEQ ID NO: 80459 - protein, 70 aa, Zea mays
  Coding DNA Sequence Number=SeqID_38680
MAVPVCLTKMSGSVHWQMKHYLRLVLYLKADEVLFEGSVIQPIVVVRGNEMVNVTHQGEWEVAAHPPSLS

SEQ ID NO: 80460 - protein, 60 aa, Zea mays
  Coding DNA Sequence Number=SeqID_38681
MSGSVHWQMKHYLRLVLYLKADEVLFKGSVIQPIVVVRGNEMVFVTHQGEWEVAAHPPSL

SEQ ID NO: 80461 - protein, 115 aa, Zea mays
  Coding DNA Sequence Number=SeqID_38682
MSGSRARLRRSGAEETTVVAAPRRWHKIEKARFVAAGVVGEDERGKDGRVRHARRRKWWRCGAEILGGGGASGAEDVRVGGRTVGVDAYTPFLRSSRDSEGQQRPSDISLCPTVS

SEQ ID NO: 80462 - protein, 413 aa, Zea mays
  Coding DNA Sequence Number=SeqID_38683
MPVVILGLDFGILATWGSNAGAVMPWGGCSDAAWRPHLFGSAAPLPRPQSAPAPAYAVRSCSRSPLPLPRPQSAPATAPPVPHQFRARQSAAAIARCPLPAIARCPLPRPRPDPQFPARQSAAHEIRFPARVDGRSGSRSPHEWKVEPRPDPATRPSMEGRGFGESQAVDGRWRIHPVNGRWRIHPASRPSMEVRARQSSVEAFILRHQMPKISRASYAYIPSMEGCVHTHGSASHPDILRSACASASQDFRAAPPPFSPPRMPHPSILASVVLANHARGHESRLRQSKDRAPAFQPRRLLPSSRIHRRRLPSTAKESTFNPVTTAPAPALHLVLLLRTSVPIAPLASSLPPPVATAQISAGCRDILSSAPSAPSQFCAASVVPPQRLSPLHQIDTIARGTPTSPQIDENLGA

SEQ ID NO: 80463 - protein, 117 aa, Zea mays
  Coding DNA Sequence Number=SeqID_38684
  Gene Ontology: Mol. function=serine-type peptidase activity; Cellular component=outer membrane-bounded periplasmic space; Biological process=proteolysis
  Homolog annotation: Hit_ID=Q8S3I8; Match level="QueryCoverage=93%, HitCoverage=23%, E-value=3e-36, Identity=90%"; Hit description=D1 protease-like protein precursor
  Pfam annotation: Domain name=Peptidase_S41; Domain location=2-82; Score=22.6; E_value=6.2e-08; Accession=PF03572.8; Description =Peptidase family S41B
MTSHGDPLLVNNRTTSASEIVASALHDNCKAVLVGERTFGKGLIQSVFELHDGSGIVVTVGKYVTPNHKDINGNGIEPDYNRLPGTLRKRQISFVAIEFCNISMKPEITFHDAELKN

SEQ ID NO: 80464 - protein, 102 aa, Zea mays
  Coding DNA Sequence Number=SeqID_38685
  Gene Ontology: Mol. function=serine-type peptidase activity; Cellular component=outer membrane-bounded periplasmic space; Biological process=proteolysis
  Homolog annotation: Hit_ID=Q8S3I8; Match level="QueryCoverage=92%, HitCoverage=23%, E-value=3e-42, Identity=88%"; Hit description=D1 protease-like protein precursor
  Pfam annotation: Domain name=Peptidase_S41; Domain location=2-82; Score=26.3; E_value=3.1e-08; Accession=PF03572.8; Description =Peptidase family S41B
MTSHGDPLLVNNRTASASEIVASSLHDNCKAVLVGERTFGKGLIQSVFELHDGSGIVVTVGKYVTPNHKDINGNGIEPDYNRLPDFNEARDYLSCCGIKELS

SEQ ID NO: 80465 - protein, 92 aa, Zea mays
  Coding DNA Sequence Number=SeqID_38686
MATAAPASVEGFNCTTNRTYLCQAYALYRAGFAGVLLDLAAIGDLFAVSRFMVAHANNLSTTAMPANGQPLLVSLQCGCPSRSPSSYAPIQY

SEQ ID NO: 80466 - protein, 125 aa, Zea mays
  Coding DNA Sequence Number=SeqID_38687
MATAAPASVEGFNCTTNRTYLCQAYALYRAGFAGVLLDLAAIGDLFAVSRFMVAHANNLSTTAMPANGQPLLVSLQCGCPSRSPSSLSTLLLLLCLCVFPVPERVVEHDNGHDQIYSTRWSRRLK

SEQ ID NO: 80467 - protein, 362 aa, Zea mays
  Coding DNA Sequence Number=SeqID_38688
MAWLLLSSALGQTNGESWLEPYMENERPLRYNSPDCPVKHRTVSAVTPDCPVCQRSNGYFASTVDCNRIQCATVRARVRARAVGAPDSLQDLSEDPLGVLTGASLSALARGGSAPGASTGRSSGLSYGYSAPTRRSSLCCAYLASIGEELGCSAPTGRSLVARVGVWQRLSLSVEPWIGPVVGWNRRLEGGWEHAPQRRWPGGDTTRVEMATDVRSTGSPTQLNPQQSPTGKKTIGASRNPKNPKRAKIWKRETEEKEAYQLEAVAVVLKGSIVLLLLLPLASALDRFPYSYGHHLCVLLLARILRLRLHLLGLLILAPRIVAASGPSSAASFRPHVRSAPPLRGVAGTNAWRRGSRWPWGK

SEQ ID NO: 80468 - protein, 154 aa, Zea mays
  Coding DNA Sequence Number=SeqID_38689
MAPDSVRCTRELEVELSTFRKMRGRSGIIHRDCPVKHRTVSAVTPDCPVCQRSNGFSRQRSTATAFNALQYAPESEHAQLARRTVYRTCLVHHWSAQRPQQSELQRLNTIGWVTMRLMVLGFDSGNGCPHCNHCSGEDEAVEGDFQEFQDYNEF

SEQ ID NO: 80469 - protein, 73 aa, Zea mays
  Coding DNA Sequence Number=SeqID_38690
MGEQRRFSELEQGARHRELETERSEQGKMEQKRSAPGEMGASRESAGLDDGDDLGECQGERSEQRGARSKLGG

SEQ ID NO: 80470 - protein, 218 aa, Zea mays
  Coding DNA Sequence Number=SeqID_38691
MGEQRRFSELEQGARHRELETERSEQGKMEQKRSAPGEMGASRESAGLDDGDDLGECQGERSEQRGARSKLGGGERQRCVVAFAELASGEEDDEGDHGSGVARAPRERELGHGKREEGSRASKKPARARRSEQGRIWEELGYMQGRARRSWMRGRACVGAEACRGGRDQRDGGGSSTEMAEQIFGSVREAIGTNQNDVNNSISDCVPFDSKSNNFIRV

SEQ ID NO: 80471 - protein, 155 aa, Zea mays
  Coding DNA Sequence Number=SeqID_38692
MATSSREGETAAKKQARAGEQVGRGSKKGARPGSQRGQGTTGERARPWEERGRKPSEQEACAREKKRAGASAQRPWKQGAARRAGKELGDRTCTHHNRNRKPRLRSREEGNLRVGSLRLCIKPGLAFQSSGREILWCRLWCGIWGYLLSSSLLRI

SEQ ID NO: 80472 - protein, 155 aa, Zea mays
  Coding DNA Sequence Number=SeqID_38693
MATSSREGETAAKKQARAGEQVGRGSKKGARPGSQRGQGTTGERARPWEERGRKPSEQEACAREKKRAGASAQRPWKQGAARRTGKELGDRTCTHHNRNRKPRLRSREEGNLRVGSLRLCIKPGLAFQSSGREILWCRLWCGIWGYLLSSSLLRI

SEQ ID NO: 80473 - protein, 125 aa, Zea mays
  Coding DNA Sequence Number=SeqID_38694
  Gene Ontology: Mol. function=cytokinin dehydrogenase activity; Cellular component=vacuole; Biological process=electron transport
  Homolog annotation: Hit_ID=Q709Q3; Match level="QueryCoverage=86%, HitCoverage=20%, E-value=3e-57, Identity=96%"; Hit description =Cytokinin oxidase 3
  Pfam annotation: Domain name=Cytokin-bind; Domain location=1-116; Score=2.6; E_value=6.3e-14; Accession=PF09265.1; Description =Cytokinin dehydrogenase 1, FAD and cy
MAATLSSLTVVGGRQGARWDNRTSVVIPDEEIFYLVGFLSSAPSLSGYGSIAHSMNLNKEIVEFCEEAGIGMIQYLAPYTTQQQWKAHFGARWETFERRKHRYDPLAILAPGQRIFPKASLPLPL

SEQ ID NO: 80474 - protein, 416 aa, Zea mays
  Coding DNA Sequence Number=SeqID_38695
  Gene Ontology: Mol. function=cytokinin dehydrogenase activity; Cellular component=vacuole; Biological process=electron transport
  Homolog annotation: Hit_ID=Q709Q3; Match level="QueryCoverage=99%, HitCoverage=100%, E-value=0.0, Identity=70%"; Hit description =Cytokinin oxidase 3
  Pfam annotation: Domain name=Cytokin-bind; Domain location=188-407; Score=458.3; E_value=9.5e-135; Accession=PF09265.1; Description =Cytokinin dehydrogenase 1, FAD and cy
MKPPSSLVHYFKLLVLLALARLTMHVPDEDVLLSLGALRLDGHFSFHDVSAMARDFGNQCSFLPAAVLHPGSVSDIAATVRHVFSLGEGSPLTVAARGHGHSLMGQSQAAQGIVDQDGVAPGSRLQVNDAGRVATVCRCSRRRALDQRRGDVVTCSPDDNADLFYAALGGLGQFGIITRARIALEPAPKMVRWIRVLYSDFESFTEDQEMLIMAENSFDYVEVTVLLSRLRFIQSTLFHTDVTYLEFLDRVHTSELKLRAQGLWEVPHPWLNLLIPRSSIRRFAKEVFGKILKDSNNGPILLYPVNKSKWDNRTSVVIPDEEIFYLVGFLSSAPSLSGYGSIAHSMNLNKQIVEFCEEAGIGMKQYLAPYTTQQQWKAHFGARWETFERRKHRYDPLAILAPGQRIFPKASLPLPL

SEQ ID NO: 80475 - protein, 85 aa, Zea mays
  Coding DNA Sequence Number=SeqID_38696
MSTSKSLGFGEVLCPRARAMTLQTTPQRSPTANIRVDILRLQVSSKHDAHAMAEKLLSSSGISEGDGADSMVPRITETSNVWLAE

SEQ ID NO: 80476 - protein, 105 aa, Zea mays
  Coding DNA Sequence Number=SeqID_38697
MAGHMRRMHGNRCYARPATIHHGDHGGAVPTRGGDTPEQSSARATTHRSPTANIRVDILRLQVSSKHGAHATAEKLPSSSGISEGDGADSMVPRITETGNVWLAE

SEQ ID NO: 80477 - protein, 111 aa, Zea mays
  Coding DNA Sequence Number=SeqID_38698
  Subcellular localization annotation: CTP_CleavageSite=48; ConfidenceScore=5.02e-01
DYVYLKVSPMKGVSRFGVKGKLAPSVCTGSDRQRGCLHRRRPVFAVIRATAVVIHVDDDPIRPPSKSHAPGDNSGDSPPYPSCSAAVADKFTDESRLPALCHVPEYLHRIV

SEQ ID NO: 80478 - protein, 122 aa, Zea mays
  Coding DNA Sequence Number=SeqID_38699
MRLGVPFIAPRQLEAVESIPGRQFLPSAAWRTGQSVSAPDQTASAAVFTADDPVFAVIRATAVVIHVDDDPIRPPSKSHAPGDNSGDSPPYPSCSAAVADKFTDESRLPALCHVPEYLHHIV

SEQ ID NO: 80479 - protein, 119 aa, Zea mays
  Coding DNA Sequence Number=SeqID_38700
MELSLVELVLIQTTRRRELAVVDAGEHMLCVAKCELSIKKDSKCGVIYSLFSGILVPLKKDPHAPFHHIQMPSSNNSNMVMQQRQLLDCSSSRFTLLRLTETVASGFGVSKGTLDSPTA

SEQ ID NO: 80480 - protein, 195 aa, Zea mays
  Coding DNA Sequence Number=SeqID_38701
MASGYGEMEHEDLSSMEPVAKEKTKTTIVHYKSSGRRLVLRLSGIRREEMLQIYVVLVRHDEGGQVVVGDGGDLNRERTGTAPRPGGTLPCSRARGTRGGQRVEMGLEEAVFGGWGRGDHSGELGKGEVSGGEGLGRGGNGVALVKRLTDVVGKRLTDAVEWLRRGGEEADGRDLCGDGVGADARLAGEGTTRHG

SEQ ID NO: 80481 - protein, 161 aa, Zea mays
  Coding DNA Sequence Number=SeqID_38702
  Subcellular localization annotation: CTP_CleavageSite=60; ConfidenceScore=5.31e-01
MANDGAVQSSLYSAVRGFRPGCWNGQRHPRGFLGSVHANARGEGTSPCQGNRQQFDAESRARARSGFTAPRGGRESRDLLAPAAFALLLLAIGEEGNTVSRDPPDRRKMGWLGQEYRGVRRFMVRNNSLLGDEIVDITPQLITLNQISKSDKYQKNKHSSI

SEQ ID NO: 80482 - protein, 53 aa, Zea mays
  Coding DNA Sequence Number=SeqID_38703
MGWLGQEYRGVRRFMVRNNSLLGDEIVDITPQLITLNQISKSDKYQKNKHSSI

SEQ ID NO: 80483 - protein, 74 aa, Zea mays
  Coding DNA Sequence Number=SeqID_38704
MDESEKGDRPPGTSNCITFESQRIGDASAPEGFDSRLRARRARDYSAYVRYMAEARATLPRYPRTFPRPAGAIL

SEQ ID NO: 80484 - protein, 60 aa, Zea mays
  Coding DNA Sequence Number=SeqID_38705
MDESEKEDRPPGTSNCITFESQRIGDASVRLCEVNSGGGLRQVAESPGSARCGGADGPRI

SEQ ID NO: 80485 - protein, 83 aa, Zea mays
  Coding DNA Sequence Number=SeqID_38706
MDESEKGDRPPGTSNCITFESQRIGDASANGSKAANGRLRQIRKEIRTGQCPVVHRTVRCARRQKARIAFPDCSQRLLAALGL

SEQ ID NO: 80486 - protein, 308 aa, Zea mays
  Coding DNA Sequence Number=SeqID_38707
MDESEKGDRPPGTSNCITFESQRIGDASGGIRAVRSQPEYDGHEFVEHGTEKCVVAVYIGSSLHHVEWSVTAAGHRFRDTCQVVARKALRALCQIYEEEVADTPLRFFPPFQRNRPVWMARMRALKGKQLLEDDPTVVYLTAYLLTLDAQYDFLARHHRQMIARAEEAEKRNSKLHVDLTTAQARASALESRESPTDPRARSIQPCSTPLKLKTPRFFEGHPVSIRGEKKAWELPEGAIVFGRNSRLSPKAMDKQEYLESSPRSPARVVLSPLTMKKIPAPSLEVQGKKLQAPRQHCRTLRNTRASPT

SEQ ID NO: 80487 - protein, 56 aa, Zea mays
  Coding DNA Sequence Number=SeqID_38708
MSKPDKTFSLLILLVLPSLHNPGVGPLRVVVEKHRRVVGRIWDKSILGVFWNMHHA

SEQ ID NO: 80488 - protein, 135 aa, Zea mays
  Coding DNA Sequence Number=SeqID_38709
MSIVHIPENSQNTLVPYSAYNSPVHTKSDDSFVTILTNSELHCATPHTPSYPLPLHTHSTPSAKANTPPNQLLRSAGYTHSVASPPVHPLVIGAFVSSRGGQICKVYARQWSYKPVPRAPLPPSPNKHGKLTGSL

SEQ ID NO: 80489 - protein, 200 aa, Zea mays
  Coding DNA Sequence Number=SeqID_38710
  Subcellular localization annotation: CTP_CleavageSite=6; ConfidenceScore=5.04e-01
MPPVSRCPLLQPPPAGWPPVLPATPRHVLLQLALLCSHVALCSSTEPGKPKPKPSGSRKALLADDDSDEVPAAKPGKSTMAGKTKKKLLASDATSKNQTKVAKAKKPESAAVARRAAKKPDGKAAAGAGSDAAIATVSKAPKPPKADKAKVPKLDKAATVAAASAKTKGTDSAKPAKVSKIGCSGAVLPRSTPCACPDLA

SEQ ID NO: 80490 - protein, 94 aa, Zea mays
  Coding DNA Sequence Number=SeqID_38711
MDGGARLLSNDKIKAAAAAVELKPHQLALLCSHVALCSSTEPGKPKPKPSGSRKALLADDDSDEVPAAKPGKSTVAGKTKKKLLAVHPLPRTRP

SEQ ID NO: 80491 - protein, 129 aa, Zea mays
  Coding DNA Sequence Number=SeqID_38712
  Gene Ontology: Mol. function=protein serine/threonine kinase activity; Cellular component=integral to membrane; Biological process=protein amino acid phosphorylation
  Homolog annotation: Hit_ID=Q69X93; Match level="QueryCoverage=73%, HitCoverage=53%, E-value=4e-35, Identity=46%"; Hit description =Putative receptor-like protein kinase 2
  Pfam annotation: Domain name=LRR_1; Domain location=46-68; Score =19.1; E_value=0.015; Accession=PF00560.23; Description=Leucine Rich Repeat
  Pfam annotation: Domain name=LRR_1; Domain location=95-116; Score =10.7; E_value=2.9; Accession=PF00560.23; Description=Leucine Rich Repeat
  Pfam module annotation: Pfam domain module=LRR_1::LRR_1; Domain location=46-68::95-116
MAMGTRYPKPVGMRNPLVPETRMGMGLGKILYPSRPQPKSIRNLKKLTMLDLSNNSFSGPIPPEIGALSNLGISLDLSSNRSVGELPDEMSGLTQLQSLSLASNGLCGSISILGELTSLASLNISYNNS

SEQ ID NO: 80492 - protein, 75 aa, Zea mays
  Coding DNA Sequence Number=SeqID_38713
MAMGTRYPKPVGMGNPLGTRNPHGYGFGQNFIPVMGMGFLAGIFFLREYRSGQVIPSGFLSVAISKSKYPSHLHS

SEQ ID NO: 80493 - protein, 209 aa, Zea mays
  Coding DNA Sequence Number=SeqID_38714
  Pfam annotation: Domain name=IQ; Domain location=122-142; Score=13.7; E_value=0.66; Accession=PF00612.17; Description=IQ calmodulin-binding motif
  Pfam annotation: Domain name=IQ; Domain location=80-100; Score=25.1; E_value=0.00025; Accession=PF00612.17; Description=IQ calmodulin -binding motif
  Pfam module annotation: Pfam domain module=IQ::IQ; Domain location =122-142::80-100
  Subcellular localization annotation: CTP_CleavageSite=32; ConfidenceScore=5.24e-01
MDRRSMTPGISSRLSSPPPAAHPSPPPDAAPSAAATPSHPPSPTPNAFTRLEESFGRLAEKWDQFVVMFHRYKEKTEKELQAAVRLQAAARGFLARRQVHFLRGEKHLAVASRATPWPSSHEQAVVRLQATVCGFLVRRAVRKLHLLISSSLHQLAACAPNHQVSSILFEPPAEVEIWLEDELVLKGGGDVMGIIGSERQQPGWDKARE

SEQ ID NO: 80494 - protein, 167 aa, Zea mays
  Coding DNA Sequence Number=SeqID_38715
  Pfam annotation: Domain name=IQ; Domain location=80-100; Score=17.6; E_value=0.046; Accession=PF00612.17; Description=IQ calmodulin -binding motif
  Subcellular localization annotation: CTP_CleavageSite=32; ConfidenceScore=5.25e-01
MDRRSMTPGISSRLSSPPPAAHPSPPPDAAPSAAATPSHPPSPTPNAFTRLEESFGRLAEKWDQFVVMFHRYKEKTEKELQAAVRLQAAARGFLARRPAPCTTQEGRLLHSDNYLGVGQTQHKNGLVPPSPFIQRELEDELVLKGGGDVMGIIGSERQQPGWDKARE

SEQ ID NO: 80495 - protein, 133 aa, Zea mays
  Coding DNA Sequence Number=SeqID_38716
MKRASLCEGTKRCQRFIYNYTKSTVRNTVDYSGQEKLFGKTDYARTVRALAADSPRHRVDFDQELQIRDSPTKPRTVQLQRADRPAIIRGQSAGEDLVQPGGDKLIKRNYIAGADRPGPRADRPRGVTEADSR

SEQ ID NO: 80496 - protein, 163 aa, Zea mays
  Coding DNA Sequence Number=SeqID_38717
METSACITNKASLELTFEYLQKNVHKPHGLLFTQRKKGKKQRCQRFIYNYTKSTVRNTVDYSGQEKLFGKTDYARTVRALAADSSRHRVDFDQELQIRDSPTKPRTVQLQRADRPAIIRGQSAGEDLVQPEGDKLIKRNYIAGADRPGPRADRPRGVTEADSR

SEQ ID NO: 80497 - protein, 133 aa, Zea mays
  Coding DNA Sequence Number=SeqID_38718
MKRVSLCEGTKRCQRFIYNYTKSTVRNTVDYSGQEKLFGKIDYARTVRALAADSPRHRVDFDQELQIRDSPTKPRTVQLQRADRPAIIRGQSAGEDLVQPEGDKLIKRNYIAGADRPGPRADRPRGVTEADSR

SEQ ID NO: 80498 - protein, 158 aa, Zea mays
  Coding DNA Sequence Number=SeqID_38719
MTNTVAAHHIMSAILDQSQHHHQNSDGQFGYPFSSGRCQRFIYNYTKSTVRNTVDYSGQEKLFGKTDYARTVRALAADSPRHRVDFDQELQIRDSPTKPRTVQLQRVDRPAIIRGQSAGEDLVQPEGDKLIKRNYIAGADRPGPRADRPRGVTEADSR

SEQ ID NO: 80499 - protein, 101 aa, Zea mays
  Coding DNA Sequence Number=SeqID_38720
MAGAGAMPNEREGLNSPKGGGGRALGRLSDSQFPARAGMRVHTQHTLCIRHWRSRWGTGTLRRACTLAAPVGRGPPRRQAALAAGEQRGQLRGSWCSSREE

SEQ ID NO: 80500 - protein, 261 aa, Zea mays
  Coding DNA Sequence Number=SeqID_38721
MVARGQPVRPACRRGAASRCPGASAADRPQRGGPARPAQPAQHHWSRLAAHLPLHRSLGIAPAPAIFVTTGEPLCCPVRPSPSLGTCLAANSSSHPSSLRACYVARVRASFARYRIGFAVVTLSALAARGARARSRVSARSSAHGCVVSCIVAIRLMVLGIGSGNASPLQSNRILAEYVDVYSPLLYTPTPPPHPQVVSIATTAQEKMKLWKETTRSSKIMTSSRRGLAATPSRQPVKAAFIYVSFSHFDYCKDYVDVSDI

SEQ ID NO: 80501 - protein, 168 aa, Zea mays
  Coding DNA Sequence Number=SeqID_38722
  Homolog annotation: Hit_ID=Q7XCF0; Match level="QueryCoverage=75%, HitCoverage=6%, E-value=7e-36, Identity=59%"; Hit description =Expressed protein
MKTFEWIILSNPLEGRGLHPLGFLDALIDCNTPTIQGDGASEPCDPKDNELKLSERLMQLLDTLQPAKFHWQWVEMRLLLDEQALMEKVAAGKTALESLRSLSPKAEGFTLSDSEKGFTEVILSRLLARPDAAPLYSEAVRLLGKLQESPCYGCEMDFTRDRCYSWPQ

SEQ ID NO: 80502 - protein, 2003 aa, Zea mays
  Coding DNA Sequence Number=SeqID_38723
  Homolog annotation: Hit_ID=Q7XCF0; Match level="QueryCoverage=97%, HitCoverage=99%, E-value=0.0, Identity=54%"; Hit description =Expressed protein
  Subcellular localization annotation: CTP_CleavageSite=34; ConfidenceScore=5.15e-01
MHRYSSNSAGFSGGRDGARLEASPFSSSSSGYPVSSRRQQQLVPYKLKCDKDPLNNKLGPPDFYPQTPNCPEETLTKEYAQAGYKETVEGIEEAREIVLSQIPYFCKPDAVIKCKEALKKRLRAINESRAQKRKAGQVYGVPLSGSLLIKPGVYPEQRPCNEDARRKWIEALAQPNKRLRSLSEHVPHGYRRKSLFEGLIRYNVPLLRATWFIKVTYLNQLQTRQTPNSISVAGSDNQRSNQWTKDVVEYLQHILDEFCSKEGAFVHPSFREQSSPGPTAGTNQIKMKTEASPAAGDIEEPLVHFKWRYMVRLIQWHLTEELLVPSVLIEWLSNQLQERDSVDVLELLLPIMLGLVDTITLSQTYVRMFVELLVRRLNDASVVDSPKGPSVSSVIAELLRSKRCDAYRYLSCGYAVCSIQKRAYDLATVANPNLQARGAAKVVQALDIALVTGNLSVAYSSLFNDLSDTLMEERWIKEVSPSLQSSLMWIGTVELSLICSIFFLCEWATCDYRDCRASPSRNVKFTGRRDLSQIHMAVSILKNKMDEMNNLSRSKSSTRVTLNNITKGSSLTDACLTAAAVDDTSGLQSNAKNVDEKKDTNDIFESPGPLHDIIVCWLDQHEVSSVAGFTRVDVLIVELIRNGIFFPQAYVRQLIISGITDKNDTMLDVERKRRHHRTLKQLPGSSLFDILEETRTVEEQQLYEMMSTYSSERRLVLSELSCDHSFYASGRGEYTASSCIRKQSDLPLASGGDKHGRVPEQVEDVKALLSSLLGFTYPSPVESEPRQIKTSFQESATSTLSQVETGEAKSGCEVCMRSKGQKLDDTATPFQGFSLIQSDEEDIWWVRKGTKLQESFNIEPVQKSVKQTSRGRAKVVPCMVTSENSWWNGLFGPTWEEFYAYEEQRSPSLSDSELSSLGRAVYENILLAADILPDVLSALVNRNSVSAIVRHPGSTAFAYVRYFLKKYRDVAGVAKWEKSFRTTCDQRLLAELDNGRSIDGELISSSGVSAGEEIDEQVRQKLNGRSSRLVQNMKEIVQRQADEIQRSLKEKKVLATPRNPPTFEKEDSYQIAHDIVSGLVECIRQNGGANPDGDLSTVASAVSAIVANAGHVIAKHLDFAGETLGDRFSRAFEIALAVETSGAVTAAFASPKMHRNQFQPSPEAHDAYGNHTSDLSNSGKGFVGRTAKVSAAVSALVVGAVVHGAVSLERMVAALKIKDGLDILQLLRGLKSSSNGVSRPTGTFRIEHSTDVLVHWFRVLLGNCRTVYDGLIADILGDSYILALSRLQQMLPLSVIFPPAYSIFAMVLWRRYIFNREDPQLYQSLSNAISDITRHQPFREICFRNTHRLYNLLASDVGDSEFAAMLETHSPDRNSKILPFIPLRARLFLDALIDCNTPTIQGDGASEPCDPKDNELKLSERLMQLLDTLQPAKFHWQWVEMRLLLDEQALMEKVAAGKTALESLRSLSPKAEGFTLSDSEKGFTEVILSRLLARPDAAPLYSEAVRLLGKLQESLVMDVKWILQGQDAILGRRSTRQQLVHIAQRKGLSTKAQVWKPWGWSSLLSDVIPNKTAKRKLEVTSIEEGEVVDDTVDAKRPSKTPPHSVDRSFEAIRSINKYLTEKALAELVLPCIDRSSADIRGILSVDLIKQMGTISEHIKAIARNGAKQAGSVPSGNEVPSSKSSGRKGIRGGSPNIGRRAPVGNDPSPPSASALRAALWLRLQFIIRLLPVIMADSKCKLLFLHILTMKILRSMRQTLASAILGLLATRMIYEDADLPLPPTNATALRREVDSLLEPPLDVLLDRPGESLFERLLCVLHALLGSYKPSWLKSRSASRSTIRIQRDFSAFDNEAAEGLQSALDHMELPETIRRRIQAAMPLLPPSRHPSLQCQPPQLSLAALTPLQSSTSGVGPQQKSCSASWVPTNVSGRSKAALPSHDPEMEVDPWNLLEDGTSCPSTASGSHGASGVTGDHANLKACSWLKGAVRVRRTELTYIGSLDDDT

SEQ ID NO: 80503 - protein, 55 aa, Zea mays
  Coding DNA Sequence Number=SeqID_38724
MGRLEPRAEWESQLVGKVCDLCRVLETGCPHCSQCSEGEAGNMDDFEEFQEYDEF

SEQ ID NO: 80504 - protein, 59 aa, Zea mays
  Coding DNA Sequence Number=SeqID_38725
MADIPVSNTLQKSHTLPTSCDSHFARGSSLPIDHYQGPYEEALRKEPEPPKVITRTPSG

SEQ ID NO: 80505 - protein, 403 aa, Zea mays
  Coding DNA Sequence Number=SeqID_38726
MRDPAPESQGRALERVGEDSARGAWGRTNATPWELVPLSHRSASRIFITQPGRTPSPAVTRDGDLQLDGGGKRAGLRPLPLPQPQGFSSPRLGRGECRVGVGPCVGGGPLLHSVMGGEAGIARGVRQLQRAWSSAASGFGATCGAGVCHGSWKRFFRRRGGRDRPRADLQLLRPSARPCLTSFGMGGGLLAAASTPRSALPLFGPPEQKSSSSPLLEQESLGPFGLVVWGSSSLVEETPWPPFGGPRPGPTPKSISRCLGLDWRPWKPVDRGPRGNRLSRLLGPDSRRSPWTAAPPEAGSGFAEDVVDAEGATAPFSVKTRASRIRSSCSVCFLRPPRPEEHTLAALAKLRLFSSCFERLDFVGNRDKVMSEVSVSRRRRSPSARSALAAYVYLVVSRIRFPK

SEQ ID NO: 80506 - protein, 477 aa, Zea mays
  Coding DNA Sequence Number=SeqID_38727
MGGSEPGSFAEKDPFRATGAPVARRVGLGSQAGVSEVGEARPSGAVACRLHGCPPLLPIGLGGNGGSPASCLPIFQAPGWGVSAAFPPPRWRNATPWELVPLSHRSASRIFITQPGRTPSPAVTRDGDLQLDGGGKRAGLRPLPLPQPQGFSSPRLGRGECRVGVGPCVGGGPLLHSVMGGEAGIARGVRQLQRAWSSAASGFGATCGAGVCHGSWKRFFRRRGGRDRPRADLQLLRPSARPCLTSFGMGGGLLAAASTLRSALPLFGPPEQKSSSPPLLEQESLGPFGLVVWGSSSLVEETPRPPFGGPRPGPTPKSISRCLGLDWRPWKPVDRGPRGNRLSRLLGPDSWRSPWTAAPPEAGSGFAEDVVDAEGATAPFSVKTRACRIRSSCSVCFLRPPRPEEHTLAALAKLRLFSSCFERLDFVGNRDVCVSESCFSRKGRVRYPYPGGVGIPRLGRPCGLRVLSLVHEALSPT

SEQ ID NO: 80507 - protein, 141 aa, Zea mays
  Coding DNA Sequence Number=SeqID_38728
  Homolog annotation: Hit_ID=Q5VQL9; Match level="QueryCoverage=42%, HitCoverage=9%, E-value=6e-18, Identity=76%"; Hit description =Putative brassinosteroid insensitive 1-associated receptor kinase 1
MGCNRVSTPGLVRSVTSKAAIKLKLVWSNRTTQLQTIDTVKIKLQSNYLDLVHILVSSFKDEQRGKSRQVASLTLTDHILQRMFEVIRMLEGDRLTERWEVSQNVDTPEFISSELLLQKYMDFAADECSLGVEAMELSGLR

SEQ ID NO: 80508 - protein, 70 aa, Zea mays
  Coding DNA Sequence Number=SeqID_38729
  Homolog annotation: Hit_ID=Q5VQL9; Match level="QueryCoverage=83%, HitCoverage=9%, E-value=2e-17, Identity=77%"; Hit description =Putative brassinosteroid insensitive 1-associated receptor kinase 1
MFEVIRMLEGDRLTERWEVSQNVDTPEFVSSELLLQKYMDFAADECSLGVEAMELSGLRIALVDEELHGA

SEQ ID NO: 80509 - protein, 116 aa, Zea mays
  Coding DNA Sequence Number=SeqID_38730
MASPFPSFLAEQRRPSVDETRCPSSFSTALHFPHGRELPIWPPSTRVLGPPSVASTDLRSSAGPQQGAPSSLSSVVPAGCSTKCAASRVMQQPIRNAIKTLGEKPLLFLMFIFRCV

SEQ ID NO: 80510 - protein, 77 aa, Zea mays
  Coding DNA Sequence Number=SeqID_38731
MERLLAVVSSATARVGKGKGMGTPSLLLEREGVGVPTAVEKLEGAPGFIHGRAALLGKEAWEGGRHGCWFPWEGECW

SEQ ID NO: 80511 - protein, 97 aa, Zea mays
  Coding DNA Sequence Number=SeqID_38732
MGEMELRREKTGRPLQGDPAMERLLAVVSSATARVGKGKGMGTPSLLLEWRSWKGHRVSSTEGRRCSARKLGKGDAMAAGFHGRASVGEDSNGEGGR

SEQ ID NO: 80512 - protein, 97 aa, Zea mays; identical to SEQ ID NO: 80511
  Coding DNA Sequence Number=SeqID_38733

SEQ ID NO: 80513 - protein, 154 aa, Zea mays
  Coding DNA Sequence Number=SeqID_38734
MGMSKKGGSSSHHFGDKRKREPSPPSEDFDNSEYSDEEFSSESEGSSVYTYPPASSDDSDDFQGIAAEVWTYIRAVERSGLEGSDESEVSSDEENSSDSSEEESGGDGDDEGVGDDGGDGDGDGDGGKGDDKGDDGDGKSGSGSSKANGKAPLA

SEQ ID NO: 80514 - protein, 155 aa, Zea mays
  Coding DNA Sequence Number=SeqID_38735
MGMSKKGGSSSHHFGDKRKREPSPPSEDFDNSEYSDEEFSSESEGSSVYTYPPASSDDSDDFQGIAAEVWTYIRGCRALRGSRARMSREVSSDEENSSDSSEEESGGDGDDEGVGDDGGDGDGDGDGGKGDDKGDDGDGKSGSGSSKANGKAPLA

SEQ ID NO: 80515 - protein, 153 aa, Zea mays
  Coding DNA Sequence Number=SeqID_38736
  Gene Ontology: Mol. function=Rab GTPase activator activity; Cellular component=intracellular; Biological process=regulation of Rab GTPase activity
  Homolog annotation: Hit_ID=Q5QMF8; Match level="QueryCoverage=57%, HitCoverage=16%, E-value=8e-24, Identity=51%"; Hit description =RabGAP/TBC domain-containing protein-like
MELYGPALVTTKDAGDAVTLLQSLAGSTFDSSQLDLTACMGYQAVEEQSNDLTDGDKNQEANCSNVDDMYHGLTVNSEIDSLPDPKDQVHHPIEGNFGLPYWPPTAPSCLGAIKGTPRRIEESPKHTLSISRLLVLTFTQSFIVLEIGALFEL

SEQ ID NO: 80516 - protein, 173 aa, Zea mays
  Coding DNA Sequence Number=SeqID_38737
MNDCVKVRTRSLGMLRVCLGDSSMRLGVPFIAPRQLGAVGGQQGRPKFPSIGRCTGQSGAPPDSHCSMSGMDLLPNLAQMTVAAPHTGQSGAHRTVRCPLPTVGAGHSSPADCAADRCAGGRWLTRQSGAPPDSPMNYSRTPPNIPESGQFAGSQPGAPDTVRCTTGQSSVPD

SEQ ID NO: 80517 - protein, 210 aa, Zea mays
  Coding DNA Sequence Number=SeqID_38738
  Homolog annotation: Hit_ID=Q6QP51; Match level="QueryCoverage=32%, HitCoverage=30%, E-value=6e-14, Identity=60%"; Hit description =Putative growth-regulating factor 1
MQEACNRTTVVHPFGFIASGGDRGRGYFERDPSPQRKRALSPPTDQGFEGWPLGRKGSTVAPERPGSVPTTDQGFEGWPSEGFNSRPRARKARDDSGYVRYMAEALATLPRRIQCEDCLTPYPDTHASVGKVEPQVQQEAPPCPTLGLGLGRRSPPRPTRGLGLNLSLGRWSSPRPTQGLGLNLGLGRNRVLAQPRPLWQNRPNYSSLSA

SEQ ID NO: 80518 - protein, 1080 aa, Zea mays
  Coding DNA Sequence Number=SeqID_38739
  Homolog annotation: Hit_ID=Q53MK8; Match level="QueryCoverage=25%, HitCoverage=27%, E-value=8e-21, Identity=31%"; Hit description=Ulp1 protease family, C-terminal catalytic domain, putative
  Pfam annotation: Domain name=TolA; Domain location=612-950; Score= -131.2; E_value=0.0086; Accession=PF06519.2; Description=TolA protein
MSQAQQGAHAVRRSPRVENKRKQLDKNELKERKKRLRLKVPPIQDAESDDEKDTEFVPGGDGSGDDNVGIVGGDENKGITKTRAIRCSPGKFIKLVNSLSDELKSEVVAKGFGNLLRFKPHLLSRKLLSWLMRKLNPETMKLEIGGGKEIQITEHSVWCVLQLPNVGSDPPPMSDADARALQDELGEQICGKSYRRISGINISIITDRLQKRTLNGELGLRAFFMAAFQCLLFSNTDTRIRIDDVKYTQDIQNMGNKNWCKAVVDRLSIAARLYRKDFAEKGINAPISGCGIFVAMLYVDNLQHGLDTSPFSIPRCAFLDSKMIDAIANMDLRGDVPPGTTEFGHLRLRSITDTCYGVPIGALAILHAPVPAPAPVAVPNPTAAPNPVAAASVPVATAAPTGTFADVLGTSHDLVGHASFNIQPPFFYQYPSFRSSFGQSITDLVGRSRKSDALNILKAFDESTSEAQSYAQKAVKYSTISRDLMAKAHHECYTGIQKLIADAIVEKRAAKERRRKVKNDPRVGAGAGTSSIAPEDQSRGGDGEEIIRSPVAIDTRAGAGSGTTSNVPEDQSGGGDSEEIQLDCSGGDLDDSLDFTRTPLCGDDIDLEEGNLNRTPPDLRGSIRSIDDILQMMYSPEHFASIDGDSPPNSQPTRAPRITVRKRKASSNPPGNDQRPVGAPETEEEPLSRDTGMQHPTAQDHITYSRRSDRSIQVANTQKAEAEKKKAEIEMKNAEAEEAEKRKAEAEQADKKKAEEAENKRKAEAEVVEIKRKAVAEEAEKKKEEEAEDKRKAEAEEAEIKRKAEAEDAEIKRKAEAEEAEIKRMAATEEVVKKKADTEKKVEAKEKRIQVAIQKQLKDNIKALKKPVPAAKLKKMFQLQMSKEYAEQRQQYEDRLNMLRQEAKAEIDSLEKSIDGQAGPSSSFDDIQFPAEYDDDINNLTQPIRLSQDEVSVGQADFSEFQRMIFKRLGDRVLKKPREYISPFKIPRNRPEIPLAKAVALRRKIAYDPELKRRILLEFGLLVGLTGEEILTSFSNDTLGESGIIDFFVHCMRHDDIVHKVDSCGYRVFLTTGFYVSFRE

SEQ ID NO: 80519 - protein, 191 aa, Zea mays
  Coding DNA Sequence Number=SeqID_38740
RILLEFGLLVGLTGEEILTSFSNDTLGESGIIDFFVHCMRHDDIVHKVDSCGYRVFLTTGFYVFVPIKDGANYFVYCFNFIHKRIDVLDSNDYFLNCSNQEERHKSLPKSQSLMQPSRKFPTSSYPELASGGGLLLMCQSKQFKGPIYRCELLHYEIFHPLNQAEIPGSLDKFRIGGRPLPIEWDSSQSNN

SEQ ID NO: 80520 - protein, 148 aa, Zea mays
  Coding DNA Sequence Number=SeqID_38741
MQPGCSPPLVAIQKDDHQPRGGEKQVVLRLPPSLSFKDVHRPCWGGGRAKSGPCPPHGLVTRFFLQHSGEKGVHQPCGGGEPRLRGADLLQAVSCSVSDPLGWTASAPPPTLPPAALAGAWLSVHRTGDGRAVRGFSTSTLSPAHRPY

SEQ ID NO: 80521 - protein, 306 aa, Zea mays
  Coding DNA Sequence Number=SeqID_38742
MAVHHGRAPVKVKLAEHREQLGHWARGRVSHLGTELGEAWCSLRRRLAAWVERERGRRILSAINAEAAWLGGLYARLGPLVYVSGHEPRGSSGQCRTRSGHVPAPDPFLHRGPPRPGTLPTLGPSKGSDIPSWGPGLRSVTSWGSVLFCHHSASRIFIMQPGCSPPLVAIQKDDHQPRGGEKQVVLRLPPSLSFKDVHRPCWGGGRAKSGPCPPHGLVTRFFLQHSGEKGVHQPCGGGEPRLRGADLLQAVSCSVSDPLGWTASAPPPTLPPAALAGAWLSVHRTGDGRAVRGFSTSTLSPAHRPY

SEQ ID NO: 80522 - protein, 553 aa, Zea mays
  Coding DNA Sequence Number=SeqID_38743
MSSPELRESSARMLEVTGGRWPKNVPIPRAASEDFFTSRMARDLRVFPYGRNTAAVVSVVMNKDRQDAAQKRRAVIRLPDARPKRARGTAKATVPGGSQSTLAAKPAAPGSSKVPESVKAVGAGGTKSAPDGAAKARELPSPGKRVADFSTNTSMDDYLVGSGEGQLDVVPPAVATTASTAVLGVKGGAFSAGGEILAATAVKNEAGTVSRRLREAADFADRVASGALTADVAVEVERLQAQHVDAVREKSATESKSSRLAEKEAALEAERTDLRRQLVEERREANQAIAKAQAAQAEAKLARAEGSLASQRAEEWEVRFNALQARMERAEASTRSEVERTRKQLVDSYTSWVRGLLTSRCPTERRAFRFLEWLQEELLALPTIVEGFMSFASLVTFEGAMNALSHEGCSHYEGFDRSDEDFGCEVFKVKDPVVKDYAGALFDRMWGPHGREAVRERSDRARDQMARAEDVEDFGHLNSAQPEAEVNPVVAEAEVDPTPPPETDEGSLAAPAPTMSGGGSSPATVPMVEDPPKAATELAAEDPMAAAGSSQVA

SEQ ID NO: 80523 - protein, 465 aa, Zea mays
  Coding DNA Sequence Number=SeqID_38744
  Subcellular localization annotation: CTP_CleavageSite=55; ConfidenceScore=5.55e-01
MVIVVSCVSVRRPTSLTAWRRVPSLRTWLSKSRDFRRSTWTPSREKSATESKSSRLAEKEAALEAERTDLRRQLVEERREANQAIAKAQAAQAEAKLARAEGSLASQRAEEWEVRFNALQARMERAEASTRSEVERTRKQLVDSYHELGARTADFEVPDREAGLRFLEWLQEELLALPTIVEGFMSFASLVTFEGAMNALSHEGCSHYEGFDRSDEDFGCEVFKVKDPVVKDYAGALFDRMWGPHGREAVRERSDRARDQMARAEDVEDFGHLNSAQPEAEVNPVVAEAEVDPTPPPETDEGSLAAPAPTMSGGGSSPATVPMVEDPPKAATELAAEDPMAAAGSSQVQDFGPAHATATANFVAASTVVARNELDESTSKFSEFDDSGSSDVWTEESSDEDLDYFAALDVVVAKASPRVTDAEVLPGPSAGRRRRRAVAKHRVSEVDGGRLRVGRAGKQELLSSP

SEQ ID NO: 80524 - protein, 136 aa, Zea mays
  Coding DNA Sequence Number=SeqID_38745
MVAKGLGRQGFILLMKKIPRTSRDLNEQNSTQGGDFARQNQGLASGTHTAAAYGARVRPPARVPQSAPSLAGVGHSGKTFGPGLYKSYPLNRNLVLKIFKERLGGGGGGSGRMGGHRYPATIYAGYKLNRLRLNGV

SEQ ID NO: 80525 - protein, 151 aa, Zea mays
  Coding DNA Sequence Number=SeqID_38746
  Subcellular localization annotation: CTP_CleavageSite=68; ConfidenceScore=5.53e-01
MAAPLTRTAILPARTPSPDPNRTTQREAFRGHQHLTRAPAKPLATAQRKRRRRVPNSTTLSRGGSLLHSAHRSSPSRFGDGGQGTRATRIYTPDEENPADISRFERTKLDAGRGFRPPGGDDDDGFGYDYGNGEDEVVEEDFQEFQGYDEF

SEQ ID NO: 80526 - protein, 163 aa, Zea mays
  Coding DNA Sequence Number=SeqID_38747
ILEDSSEELLPMPTPLAESLAFAARSSTSAPPAPGGDDTDDSRDDDEDDEDDEEHINEEAKYAQQNYFMGDRGFWTLSAHDSLTLLSTYPASVSDATRWTLWKPDPASFQVELVRIASTPLTGVVDGLNTDLDSATLDLSRVHLELEDAHGQDCSSGALCNTP

SEQ ID NO: 80527 - protein, 117 aa, Zea mays
  Coding DNA Sequence Number=SeqID_38748
MTREARQGSRSSERMAGWFILSTRVNTNYASPPRQAPIYPVVVEEVPVDLPCIRVEHGVILEDSSEELLPTPTPLAESLAFTARSSTTTPVTLGFRRQTTCEPCTCQDQQFTYTTVT

SEQ ID NO: 80528 - protein, 280 aa, Zea mays
  Coding DNA Sequence Number=SeqID_38749
  Gene Ontology: Mol. function=monooxygenase activity; Cellular component=membrane; Biological process=fatty acid biosynthetic process
  Homolog annotation: Hit_ID=Q9M464; Match level="QueryCoverage=99%, HitCoverage=59%, E-value=2e-86, Identity=57%"; Hit description =Allene oxide synthase
NELARVGKADFGHHNDAAAFSFLCQALLGRDPAESALHGDGPKLITKWVLFQLSPLLSLGLPKHLEDSLLHSFRLPPALVRKDYGRLADFFRDAARTVVDEGERLGIAREEAVHNILFATCFNSFGGMKILFPSLVKWLGRAGARAHGRMSRSTAAPSGTWWWRATTTASRCARARCSSATSPMATKDPRVFARAEEYVPDRFLGEDGAQLLRHVVWSNGPETASPTLQDKQCAGKDFVVLIARLLVAELFLRYDSFDVQVGASALGSSVTITSLKKATF

SEQ ID NO: 80529 - protein, 208 aa, Zea mays
  Coding DNA Sequence Number=SeqID_38750
  Gene Ontology: Mol. function=hydroperoxide dehydratase activity; Cellular component=chloroplast; Biological process=fatty acid biosynthetic process
  Homolog annotation: Hit_ID=Q7Y0C8; Match level="QueryCoverage=99%, HitCoverage=45%, E-value=7e-75, Identity=78%"; Hit description =Cytochrome P450 74A1, chloroplast precursor
  Subcellular localization annotation: CTP_CleavageSite=43; ConfidenceScore=5.63e-01
MSRWARPYCMATGGSMRSASYTADSTSRHLASAFMVNSPAWARTASRTSVTSGRVEARGEEDVVHRLLPRNAEALALVDHGPGRVAEEVGEPAVVLPDQRRREAERVEQGVLEVLGQAEAEQRAELEQHPLGDQLGPVAMERGLGGVAPQQRLAEEGEGGGVVVVAEVGLADPGELVLHDPEEVAVHLAELGGSRAADGARGGRRGAP

SEQ ID NO: 80530 - protein, 117 aa, Zea mays
  Coding DNA Sequence Number=SeqID_38751
MGKPVPSLLMLLLSRGRVPLDSPTRWQDGRPSHSSNHFLQRTCKNYATSKAEYTNTQLDLPVTALVPTITGMGDLVSGRVRGYVHCQVHSGFNNIMLKRTKLRSNLGFLSHAGLPVG

SEQ ID NO: 80531 - protein, 118 aa, Zea mays
  Coding DNA Sequence Number=SeqID_38752
MGKPVPSLLMLLLSRDGVPLDSPTRWQDGRPSHSSNHVLQRTYKKYATSKAEYTNTQLDLPGYNGSSSLISCEKQTIRIEFLSLQGFNNIMLKKKTKLRSNLGFLGHAGLLVGYAYHF

SEQ ID NO: 80532 - protein, 65 aa, Zea mays
  Coding DNA Sequence Number=SeqID_38753
MTHEINSHPWRQMKSYLRFALYLKADEVLFEGSVIQPIVVVRENEMVLVAHQGEWKVAAHPPSLS

SEQ ID NO: 80533 - protein, 51 aa, Zea mays
  Coding DNA Sequence Number=SeqID_38754
MTHEINSPLKADKVLFEGSVIQPIVVVRGNEMVLVAHQGEWEVEAHPPSLS

SEQ ID NO: 80534 - protein, 76 aa, Zea mays
  Coding DNA Sequence Number=SeqID_38755
MQLHTLRGMKAEDICIYIHMHPLKVIFADDGGFIPSKVLLMQGSVIQHIVVVRGNEMVLVAYQGEWEVAAHTPSLS

SEQ ID NO: 80535 - protein, 85 aa, Zea mays
  Coding DNA Sequence Number=SeqID_38756
MALAWLRRGAGRARARVSVLWRGQKASNTWRHTKYYLRIALYLKADKVLFEGSVIQHIVVVRGNEMVLVAHQGEWKVAAHTPSLS

SEQ ID NO: 80536 - protein, 83 aa, Zea mays
  Coding DNA Sequence Number=SeqID_38757
MTVAFLCRVLPGYHTRFLEEDPKVLITASTADIPVSNTLQRLHTLPISCDSHSAQGSSLPIDHYQGDLAGSHYVAFTKISQRT

SEQ ID NO: 80537 - protein, 156 aa, Zea mays
  Coding DNA Sequence Number=SeqID_38758
MMLVDYTTVLDRPSVSVEGLTQQGIESIVEVTPVSGVTSDGSSDPSLRLLRELRVVARTATDVVIVFVSVRVSSSSRDALRWCRGHLWLRCRRIPRLLITASTADIPVSNTLQRLHTLPTSRDSHSAQGSSLPIDHYQGDLAGSHYVAFTKISQRT

SEQ ID NO: 80538 - protein, 237 aa, Zea mays
  Coding DNA Sequence Number=SeqID_38759
MATSSLMVGESEPGCGLCSSLSLKDFHHQGWGGEEGRPSSVAPAAAPCLALGREWLRSRSQCRRLPRQLEEVLPPTLIAKAGHGLTSNSTAFCPSLPHEFGHGRGPPGSSIRPEVSAAAVRPPGAEVIVVAAAGAGNDKPFVGLLLLRRPTPVEWGCSYLRRGRNRRSVCNGTSNADSSVDYLNRFTKHESPRVKVTSEVGLAPLGDGRLRPQGQPAEPPARAGFPEKSLAAIARAW

SEQ ID NO: 80539 - protein, 429 aa, Zea mays
  Coding DNA Sequence Number=SeqID_38760
  Subcellular localization annotation: CTP_CleavageSite=50; ConfidenceScore=5.46e-01
MSLADDVTAAPARLPTVITASPLLARVDRRVRLALLGRALGSPRVAVLVPQSRRRGGGASGGAVACMQHLARRLCDAWAWASVLACRESEKRVHLARWHAACMAARLFRTLVWAKVGGSLVAAGRLRAPHAAVWLLLLGAGLYDTRDPAPAPQGRALERVGEDSARDGWGCKQGELPLKGGPAASLHRRSPKMATSSLMVGESEPGCGLCSSLSLKDFHHQGWGGEEGRPSSVAPAAAPCLALGREWLRSRSQCRRLPRQLEEVLPPTLIAKAGHGLTSNSTAFCPSLPHEFGHGRGPPGSSIRPEVSAAAVRPPGAEVIVVAAAGAGNDKPFVGLLLLRRPTPVEWGCSYLRRGRNRSSVCNGTSNADSSVDYLNRFTKHESPRVKVTSEVGLAPLGDGRLRPQGQPAEPPARAGFPEKSLAAIARAW

SEQ ID NO: 80540 - protein, 74 aa, Zea mays
  Coding DNA Sequence Number=SeqID_38761
  Subcellular localization annotation: CTP_CleavageSite=48; ConfidenceScore=5.24e-01
MGWITRGPPFWMRSQDETTSSQVFVRRRMRRRVNEVLFEVGIVSEGACCSSREVGSSSTSTFTLIITLLRRSHD

SEQ ID NO: 80541 - protein, 50 aa, Zea mays
  Coding DNA Sequence Number=SeqID_38762
MRLHTLRGMKRYEDRVPTLCVPMHILKGYLQVLVAHQGNWEVAAHPPSLS

SEQ ID NO: 80542 - protein, 155 aa, Zea mays
  Coding DNA Sequence Number=SeqID_38763
MPVCYGGRLVSMGGGAQSCCVVERRGAGASAWSREVEADRRGCCPCAREAREEGARPWRFVVTPWEKGAELPAVAARQGQEDERRWLFGKRRESDIVPGAGQRWKKVRTPWLLGAPAPWEPGQRPLQGVEACALEEEEEVARRLKEKRERNGCGG

SEQ ID NO: 80543 - protein, 177 aa, Zea mays
  Coding DNA Sequence Number=SeqID_38764
MTTWSNASNTRRRGHGDCDIAVVHDIELHSGISSNAREAPTMRGCGGNSAARSCAVGGWTCFSQSGGGGAVHWTVQNSEPKEHGVAVAAAGGMPVCYGGRLVSMGGGAQSFCVAERRGAGCRQRARGRERSTETPCSVEMKGATSCNPTTWRTGSSTWLPWQQRPPRPGIQLEEPSV

SEQ ID NO: 80544 - protein, 191 aa, Zea mays
  Coding DNA Sequence Number=SeqID_38765
MGRQGNRIRGSGWEKVGGARLVTPISTKLQRPDGRDSGQGSIHSRDTISPRPSPASGRNSRPRRIHVSPEGPLSNGHTFDSPEAQLGQASRRSNLGQIVTPTDRLGLTLDLGRRTPPRPTPGLGLNLDLGRRTLPRPTLGLGLNLDLGRRSPPRPTPGLGLNLDLGGVTASPDLGLGPTTSQGGHHYPTPS

SEQ ID NO: 80545 - protein, 402 aa, Zea mays
  Coding DNA Sequence Number=SeqID_38766
  Homolog annotation: Hit_ID=Q6QP51; Match level="QueryCoverage=16%, HitCoverage=28%, E-value=4e-09, Identity=60%"; Hit description =Putative growth-regulating factor 1
  Subcellular localization annotation: CTP_CleavageSite=2; ConfidenceScore=5.16e-01
MQAGSEQKKPNRHARCVQPPSGCKRLSTFAQTNGREGEQPCRRHATAPNGRTSPTPNTLGMEAQAHASCDRRAECFVHTAAPPLVPPPRLLDCRTNTATRGDPAHNPTAPAWRDGQYGQKQAGSNGGGRRAGAAEKRATLRLRHNDRVKKGTGKGGTPKRILPREGTRLRASLLIRGSKAGPSEGFDSRLRSRGLYTHYWSEVRRPTPRKGPTTASGFSGSAPTTDQGVRRLAPEGFTTASDTERGMTMAHRRHHVRRPSRATWRFPPLLLAERRRRGVCKKVESVPDRPLALCRGSGAALANPAPAEPLTASTYQPENLGPDRTPGLRPARMRVDQTSRSITRGIKTSEESNHSSEASGATPGGCARAHPPEQSATEKGWSPCKKLVTPISIKLQRPDGCD

SEQ ID NO: 80546 - protein, 325 aa, Zea mays
  Coding DNA Sequence Number=SeqID_38767
  Homolog annotation: Hit_ID=Q6QP51; Match level="QueryCoverage=39%, HitCoverage=56%, E-value=8e-14, Identity=47%"; Hit description =Putative growth-regulating factor 1
MGEIYERMDCMVGEIKDIMTKDDNSHKDDFVEVESIVMRRWEKMNLPLHCLAYALCPKFYHQQYLNTPAPGGTIRQAPNTDKEVMTNVFEAFSKIADSPREQQVLREQFNAFIMKKGMFAMPPVESDAFTMEPIEWWVGFACSRGLQASAREGARGLHAPSRPLRAANPSYECPGPSFYRRKERAQGNDGPSCDVVGPSPGSGEAEAPPRSRSSLSSEVKVESEPLGRARRRPSAEARAESEPWGRARRCSSSFGAEAESEPWGRARRSFLWRPRPDLAAVSLTLSSGTAVRATQAALSSCQAGQWSGEVTAVTSALSTEGRASG

SEQ ID NO: 80547 - protein, 254 aa, Zea mays
  Coding DNA Sequence Number=SeqID_38768
  Gene Ontology: Mol. function=protein dimerization activity
  Homolog annotation: Hit_ID=Q2QPA8; Match level="QueryCoverage=67%, HitCoverage=19%, E-value=8e-09, Identity=25%"; Hit description=HAT family dimerisation domain containing protein
MMLIAKQLERKLKKEALATTVVTRQWKDWVNTCTNDVKHQARVIVLTINDDSFWMEAENIIAITEPIYSVLRFSDGEGPKMGEIYERMDCMVGEIKDIMTKDDNSHKDDFVEVESIVMRRWEKMNLPLHCLAYALCPKFYHQQYLNTPAPGGTIRQAPNTDKEVMTNVFEAFSKIADSPREQQVLREQFNAFIMKKGMFAMPPVESDAFTMEPIEWWVIGIVRLLLYLENMTRNRVCPSLRFSLGLGKGMGYMD

SEQ ID NO: 80548 - protein, 114 aa, Zea mays
  Coding DNA Sequence Number=SeqID_38769
MDKVKINIKEKSIWKRDGFVQPKTVQSGSTGLSGGAPDSVRCDISGVEVVLTIARTKQTPRGTPTLTSDATAGGDPRDGDDDVDVNKDDPLPNNYTEDHEYEEWIIAHLLGCNH

SEQ ID NO: 80549 - protein, 197 aa, Zea mays
  Coding DNA Sequence Number=SeqID_38770
MAFRSYQRMSLLIAWRIIVKEKCAFGPFLSILVVECQHKWSCVNLCQMMDKVKINIKEKSIWKRDGFVQPKTVQSVSTGLSGGAPDSVQCARLALVKRPLSGIRRRRMAKIHRTVRCAPDCPERNPHRTVSGGAPDCPVRQSTEGKNCLPGMLSTAPSCLGAIKGTPRRMEEDTKHSLSIPKHQDSNSEHLILCDSN

SEQ ID NO: 80550 - protein, 210 aa, Zea mays
  Coding DNA Sequence Number=SeqID_38771
  Gene Ontology: Mol. function=DNA binding
MVHIVEHQDFMLEDFMLEEEAASSIPRATNLPVPGAAAAVHSARPHTPTQTSRAPRAMPGALSAARELLCHPPSPMASPGAMKQWRDDVDRLLGMAHSGTTRPRPRSSRRQHEALASVRSPSVRAAPTEDLRAELSCRRAVEDAPVSWERSNDLRVELNRRRAGEDARVSLERALARTWLMNLAPGSIYSWEELCAWFTANFASAYQQHG

SEQ ID NO: 80551 - protein, 174 aa, Zea mays
  Coding DNA Sequence Number=SeqID_38772
  Gene Ontology: Mol. function=DNA binding
MVHIVEHQDFMLEDFMLEEEAASSIPRATNLPVPGAAAAVHSARPHTPTQTSRAPRAMPGALSAARELLCHPPSPMASPGAMKQWRDDVDRLLGMAHSGTTRPRPRSSRRQHEALASVRSPSVRAAPTEDLRAELSCRRAVEDAPVSWERSNDLRVELNRRRAGEDARVSLERA

SEQ ID NO: 80552 - protein, 199 aa, Zea mays
  Coding DNA Sequence Number=SeqID_38773
  Subcellular localization annotation: CTP_CleavageSite=42; ConfidenceScore=5.88e-01
PRDAPPQPPSHRAAAANPSRRRRSVSSPHRGFALRGRSLIPVAKEALPPSSSSQVRPLSSVRVPSHSPPPPPSFIDTDSIADKAIGRMQEISDKIFSVARETIRPGRGLTSFDATKLRVALEEIACMLEQDSLVLQEHLDIVNNFNIPVDSSYEPSTLSSPPPSDDDLTPHWDFAEHFQNFWGVEYDSDQMPSFSDNDV

SEQ ID NO: 80553 - protein, 131 aa, Zea mays
  Coding DNA Sequence Number=SeqID_38774
MRLGPRSAEPTEDGNETRRRITGAAEVRRTYHDAGRRRNAGGAMGSRRRRDGLAAAGDGRVGYNPREVGAASNRSQVTGASGVKCADGFQRKRVVEKRREKRRVWLQLLLLAARSRPEAEPNSRRGMETET

SEQ ID NO: 80554 - protein, 242 aa, Zea mays
  Coding DNA Sequence Number=SeqID_38775
MVWRERVLPSSVSAVTHPHRRPALRLVFCPNQKNEEEIEVTKEKTPPPSDSQAGNCFYFDICGSEPDSPTNEGKPRVFDFEKPYLDSLITSIPLRVFSLVGHEESSSGSNDPIGDLEAQVELLQSELRYRNDLWVADAAICYLQDQLAKRDLALNWAINSRPLAWAKEAKARARMEELSSAMDNLQIYYNTLHEEVHVLYSQLHPNVSADPVGMEAGPSHVAGETLDGELDLFRAPSLYEVG

SEQ ID NO: 80555 - protein, 104 aa, Zea mays
  Coding DNA Sequence Number=SeqID_38776
MVTAAELDKNAGDHRRTALCRMSEPFHRVAVTPYSCPIVAGEVATTVDTNSQRPENEEEIEVTEEKTPPPLDSQAGNCFYFDICGSEHDSPTNEGKPRCICHPP

SEQ ID NO: 80556 - protein, 343 aa, Zea mays
  Coding DNA Sequence Number=SeqID_38777
MDPGTHMVCARFYPLETGVTEVVSKPRQIPVYPVVVEEVPTDLPPIRVENVVILEDSSEEQLPTPTPLVESLAFAAGSSTSAPSALAFQAPAPGGDDLDNSGDDDDEDEDDEEGGDEHVHEEADYTQQGQLHGVWSCCRTLHINVRDGALPHLLQEVLHALGTYVRPLYETRRVSEPPRACYYITRIHVRVMDAGDRGFRTLSAHESLTPLSTYAASVSDAARRTLWSLSHTYRQQLQNTRFRHLPQRLSGGSQTNIVTGEAGEDRLNTLAGVVAGLNTDLDSATLDLYRVHLELENAHARIAALEAQLQGLEPLEAQVPAMALSPPRKRLRYGEPGSVTRLL

SEQ ID NO: 80557 - protein, 343 aa, Zea mays
  Coding DNA Sequence Number=SeqID_38778
MDPGTHMVCARFYPLETGVTEVVSKPRQIPVYPVVVEEVPTDLPPIRVENVVILEDSSEEQLPTPTPLVESLAFAAGSSTSAPSALAFQAPAPGGDDLDNSGDDDDEDEDDEEGGDEHVHEEADYTQQDNFMGFGPVVEHYTSMFETGHFPNLLQEVLHALGTYVRPLYETRRVSEPPRACYYITRIHVRVMDAGDRGFRTLSAHESLTPLSTYAASVSDAARRTLWSLSHTYRQQLQNTRFRHLPQRLSGGSQTNIVTGEAGEDRLNTLAGVVAGLNTDLDSATLDLYRVHLELENAHARIAALEAQLQGLEPLEAQVPAMALSPPRKRLRYGEPGSVTRLL

SEQ ID NO: 80558 - protein, 164 aa, Zea mays
  Coding DNA Sequence Number=SeqID_38779
  Subcellular localization annotation: CTP_CleavageSite=19; ConfidenceScore=5.05e-01
MALDTVSCCFSAHVLLFAVATAVKSSESLNSPIVSWSVIDFIFVMVLTRVVEPVIPCSIPTSPARSRLQLKVVVDPCVIKKFQESSEDGASNVIFTKCTTKSSNILRDSSSRRLFISYYVYLLIITCCIVPFHEGTIINRVMGKKTQVEPQAQTNLQDDAGGLT

SEQ ID NO: 80559 - protein, 633 aa, Zea mays
  Coding DNA Sequence Number=SeqID_38780
AAQAEAKVARAEGSLARQRAEELEARLNALRNRVDMAEASTRAEVERMHAQFVDAYRELGAWTAAFEAHDQEAGLRFLEWLQEELGVLLTIVTGLISFASLITCEGAVNALSREGCRHYEVFDQFDENFEREIFKVEDPVLKLLAGALFDRMWGPHGREMVQERSNRAIDQMAHAEGVEDLGGLDGALLEAAEVDPVPPSDAGKGPSSTAAGEGPAPAPARTCEDASKAVVKPATKDPAAAAEPSQMFFKRRLSSSSSLSPPLLCSGFFSRDRAGTFAYRASCFPFQPTEAPSSSHGASDSLSHGSLYDRPRSLHGHELSPCSALAAEFLCASSLPAGALKFLCSPELSLSCDPAPFPRRPVARPGRIPCAPRELAGVLPIRPWLQLKVVVDPYVIKKFQESSEDGASNVIFTKTLYLATYLVMGKPEPDYSIHEKTIAHWEWRDGESGTHPPGKGPPKRGDPQLGINRFGSSNFSDMKTGSSTLIPSEVFETRTSACGPNNLGGSATAPIDDSVPGSMSECFESDGESGSSFPWTEESSNEGLDYFVALDVAAAETSPRVEGAEDLPGTSTGCRRRRVVGKQCVGEFSRSGRHRRTGMERGRLQVDGVGKRELLSSPNGAGIGEGDLRELFE

SEQ ID NO: 80560 - protein, 80 aa, Zea mays
  Coding DNA Sequence Number=SeqID_38781
  Subcellular localization annotation: CTP_CleavageSite=62; ConfidenceScore=5.73e-01
MDAQARSALSSPLLLSLSTKRPLQSSPSCLPPLPNGALLFSSLFQTGIRTFDHLHVSLRRICAAPTSTTFTPARNPVFCV

SEQ ID NO: 80561 - protein, 154 aa, Zea mays
  Coding DNA Sequence Number=SeqID_38782
MAAGRIGVPCCRTRGKGERKKGGRRWGEEEDNLGKIAGGRLVERGAGASSRRSWLGRPWRLEDEDNGKNCSQGERPTGKMEARASSAAAVRGRRSRGAMDDGEEDVAGEWELLLHAMDMEFGGPGKNGAHAWAGEHLLQGSSTMEQKGRCCPAC

SEQ ID NO: 80562 - protein, 185 aa, Zea mays
  Coding DNA Sequence Number=SeqID_38783
  Homolog annotation: Hit_ID=Q942Z3; Match level="QueryCoverage=35%, HitCoverage=18%, E-value=8e-19, Identity=74%"; Hit description =Putative shock protein
MMSGVVPSSLHVLLRAERALRDRDVGEVHIPLSELLSGAPDGPVPAKFVAYQVRKISSRKPQGVLNLSYKLGEVANGYAPAPPPSPPTPSLHRPPRTRLLQARLMPTRLPPRTRLLQARPTPKADAYPPPYGAYPPAGGKADAAYPPSSGYPPTAGKPGKGGEPVTAYPSAGPSTAAPYAARLPQ

SEQ ID NO: 80563 - protein, 418 aa, Zea mays
  Coding DNA Sequence Number=SeqID_38784
  Homolog annotation: Hit_ID=Q6I628; Match level="QueryCoverage=42%, HitCoverage=48%, E-value=1e-89, Identity=94%"; Hit description =Putative phosphatidylserine synthase
  Pfam annotation: Domain name=PSS; Domain location=288-418; Score=7.6; E_value=2.9e-15; Accession=PF03034.6; Description=Phosphatidyl serine synthase
MMSGVVPSSLHVLLRAERALCDRDVGEVHIPLSELLSGAPDGPVPAKFVAYQVRKISSGKPQGVLNLSYKLGEVANGYAPAPPPSPPTPSLHRPPRTRLLQARLMPTRLPPRTRLLQARPTPKADAYPPPYGAYPPAGGKADAAYPPSSGYPPAAGKPGKGGEPVTAYPSAGPSTAAPYAARLPQYSSTGGGSDHDERRGAPADEQGTHLSEWVDRSPPPDALIVLAWRDPATAPRDWAQRWASGALDPEGAAAHSSLTSIKRGVWAMIASFLAYCTLQAPSTILIRPHPAVWRLVHGLAVVYLVALTFLLFQNRDDARQFMKLLHPDLGVELPERSYGADCRLYVPENPKNKFINIYETLFDEFVVAHILGWFGKAVMIRNQLLLWVLSIGFELMEVFGQECTQSVTLMAKRMNGSD

SEQ ID NO: 80564 - protein, 301 aa, Zea mays
  Coding DNA Sequence Number=SeqID_38785
  Gene Ontology: Mol. function=heat shock protein binding; Cellular component=membrane; Biological process=protein folding
  Homolog annotation: Hit_ID=Q0PMD7; Match level="QueryCoverage=84%, HitCoverage=61%, E-value=1e-110, Identity=75%"; Hit description=J -domain protein
  Pfam annotation: Domain name=DnaJ_C; Domain location=118-242; Score =32.1; E_value=4.4e-09; Accession=PF01556.9; Description=DnaJ C terminal region
  Pfam annotation: Domain name=DnaJ_CXXCXGXG; Domain location=23-105; Score=75.0; E_value=2.4e-19; Accession=PF00684.9; Description=DnaJ central domain (4 repeats)
  Pfam module annotation: Pfam domain module=DnaJ_C::DnaJ_CXXCXGXG; Domain location=118-242::23-105
MTESANARRRSTDQEGPIISVAGRARRLYLLMKMIDNLYCCYDGVSRCAGCQGSGFKVQIRQLGPGMIQQMQHLCNECKGSGETISDKDRCPQCKGDKVVPEKKVLEVVVEKGMQNGQKITFPGEADEAPDTATGDIIFVLQQKEHPKFKRKGDDLFHKHTLTLTESLCGFQFVLAHLDNRQLLIKSNPGEVVKPGSFKTINDEGMPMYQWPFMKGKLYIHFSVEFPNSLSPEQCKALEVVLPPKPVSQYTDMELDECEETMPYDVNIEEEMRRRQQQHQEAYDEDDDVPSGGQRVQCAQQ

SEQ ID NO: 80565 - protein, 344 aa, Zea mays
  Coding DNA Sequence Number=SeqID_38786
  Gene Ontology: Mol. function=heat shock protein binding; Cellular component=membrane; Biological process=protein folding
  Homolog annotation: Hit_ID=Q9SWB5; Match level="QueryCoverage=99%, HitCoverage=100%, E-value=1e-119, Identity=57%"; Hit description =Seed maturation protein PM37
  Pfam annotation: Domain name=DnaJ; Domain location=13-86; Score=55.2; E_value=2.2e-13; Accession=PF00226.21; Description=DnaJ domain
  Pfam annotation: Domain name=DnaJ_C; Domain location=161-285; Score =31.9; E_value=4.6e-09; Accession=PF01556.9; Description=DnaJ C terminal region
  Pfam annotation: Domain name=DnaJ_CXXCXGXG; Domain location=72-148; Score=76.8; E_value=7e-20; Accession=PF00684.9; Description=DnaJ central domain (4 repeats)
  Pfam module annotation: Pfam domain module=DnaJ::DnaJ_C::DnaJ _CXXCXGXG; Domain location=13-86::161-285::72-148
MFGRTPKKSDNTRYYEILGVSKDASQDDLKKAYRKAAIKNHPDKGGDPEKVVSSNENDCQSLCEEQRGMLGSVYLTLYSDLSCCYDGVSSCAGCQGSGFKVQIWQLGPGMIQQMQHLCNECKGSGETISDKDRCPQCKGDKVVPEKKVLEVVVEKGMQNGQKITFPGEADEAPDTATGDIIFVLQQKEHPKFKRKGDDLFHKHTLTLTESLCGFQFVLAHLDNRQLLIKSNPGEVVKPGSFKTINDEGMPMYQWPFMKGKLYIHFSVEFPDSLSPEQCKALEVVLPPKPVSQYTDMELDECEETMPYDVNIKEEMRRRQQQHQEAYDEDDDVPSGGQRVQCAQQ

SEQ ID NO: 80566 - protein, 123 aa, Zea mays
  Coding DNA Sequence Number=SeqID_38787
MKKKSKRDLEMKHKTAALKLTQRFLSKDLKWERQEMCEREREVFLGLEMEFKSCSLLWGERSEVRGVRDQLNCPSGPVQPVLTSEFRRENPSSTAQRQVQLVYGQRGSQLKLSSAEVEKAQLS

SEQ ID NO: 80567 - protein, 123 aa, Zea mays
  Coding DNA Sequence Number=SeqID_38788
MKKKSKRDLEMKHKTAALKLTQRFLSKDLKWERQEMCEREREVFLGLEMEFKSCSLLWGERSEVRGVRDQLNCPSGPVQPVLTSEFRRENPSSTARRQVQLVYGQRGSQLKLSSAEVEKAQLS

SEQ ID NO: 80568 - protein, 120 aa, Zea mays
  Coding DNA Sequence Number=SeqID_38789
MKKKSKRDLEMKHKTAALKLTQRFLSKDLKWERQEMCEREREVFLGLEMEFKSCSLLWGERTGSTGIDQRGPEKIPRLNFSWTPVEPLWTPVELARTPVEVEVQLELRKFNTAEVQLSCS

SEQ ID NO: 80569 - protein, 115 aa, Zea mays
  Coding DNA Sequence Number=SeqID_38790
MKKKSKRDLEMKHKTAALKLTQRFLSKDLKWERQEMCVREREVFLGLEMEFKSCSLLWGERTGSTGIDQRGPEKIPQLNFSWTPVEPLWTPVELARTPVEVEVQLELRKFNTAEV

SEQ ID NO: 80570 - protein, 294 aa, Zea mays
  Coding DNA Sequence Number=SeqID_38791
  Homolog annotation: Hit_ID=Q10M01; Match level="QueryCoverage=39%, HitCoverage=20%, E-value=2e-20, Identity=45%"; Hit description=Zinc finger C-x8-C-x5-C-x3-H type family protein, expressed
LANRVVGAGAGSIVVTCVKHEYQPAEVTKMDGAIQRVYTRKNWSSMVLYNYSHPNNVVPVTSEIVSAQTGTFLHLLPGSTMTRSGNCPSPETSSSVTTRLTRLIWPHAPGPSTIPPTVAVCVWVVLCRPGTHASSGASSGSSPAEPNSCLSDRGPLETFAQRGGRRWDLDSWATVGMLLGGEDMHRFPVRSPRMDRDDLIRSPAARQIDVRIPYQQKRMFDFVTFVYAETVKAILSKGNPHFVCDARSSSPTRRRVRKLQHAHHGGAEFAGCASPTGLLDSRDPYALLLLSSAQ

SEQ ID NO: 80571 - protein, 241 aa, Zea mays
  Coding DNA Sequence Number=SeqID_38792
  Homolog annotation: Hit_ID=Q2K5X5; Match level="QueryCoverage=27%, HitCoverage=28%, E-value=4e-07, Identity=41%"; Hit description =Hypothetical conserved protein
  Subcellular localization annotation: CTP_CleavageSite=18; ConfidenceScore=5.05e-01
MKLWKETSRSSKITTSSRCGLAATPSRLPVKAALSTFLFRTLIYFVEHHGGPVLARIHSLDGTIHLGDLGGLILVLDTGHNNAASTSADDAVGQVCKLEEVAVDEERPAAVAQICTTHIVVALNAAALAWLDVWGCGGSGQWDGTEERWRARLLGRGRTLPQRRARRELRCRGGRGGRGLAMRGWRRRGLSSSFQAAAGLVLLIPGGGGGACAWRGGCSARGWPARMGRNRRAGWLGMKVG

SEQ ID NO: 80572 - protein, 68 aa, Zea mays
  Coding DNA Sequence Number=SeqID_38793
MEKLLASLEASLEDHAGLLAAVAQADVVRTSVTFSREPAPRNSRVPGAAGNRVKPAAIAEEGAAATAS

SEQ ID NO: 80573 - protein, 148 aa, Zea mays
  Coding DNA Sequence Number=SeqID_38794
  Gene Ontology: Mol. function=transcriptional repressor activity; Biological process=regulation of nitrogen utilization
  Homolog annotation: Hit_ID=Q2QUH8; Match level="QueryCoverage=61%, HitCoverage=29%, E-value=1e-32, Identity=77%"; Hit description =Isoflavone reductase, putative, expressed
  Pfam annotation: Domain name=NmrA; Domain location=6-148; Score= -93.0; E_value=0.0083; Accession=PF05368.3; Description=NmrA-like family
MENSRVLVVGGTAYIGQRLVRASLAQGHPMLVLLRAEIGLDIDKLQMLLSFKAQGAWLVEASLEDHAGLLAAVAQGDVVVSAMSGAHIRSHNSPKGDMGRVRTLGGMGGSTQLRGQQGGWGRSTTPRYSRVPPDLPPIRSEEAIHCRQ

SEQ ID NO: 80574 - protein, 127 aa, Zea mays
  Coding DNA Sequence Number=SeqID_38795
MTGRLCAIAEIVLSYLIDSYIKDRRHEMRRFAESICYDNPMHVERRRLKAANEKRAQDAREWEAVRAKKQILGNLPGRLSARKTATMELMEEEDTSRLSELITLAEAGIHGKEEDDTLRLTMLILEE

SEQ ID NO: 80575 - protein, 87 aa, Zea mays
  Coding DNA Sequence Number=SeqID_38796
MHVERRRLKAANEKRAQDAREWEAVRAKKQILGNLPGRLSARKTATMELMEEEDTSRLSELITLAEAGIHGKEEDDTLRLTMLILEE

SEQ ID NO: 80576 - protein, 198 aa, Zea mays
  Coding DNA Sequence Number=SeqID_38797
  Homolog annotation: Hit_ID=Q8GU89; Match level="QueryCoverage=20%, HitCoverage=2%, E-value=5e-07, Identity=63%"; Hit description =Pleiotropic drug resistance protein 4
MSADWHEMLSRREKATNFKPDYDIDIHMKVLAMSGQVSSILTGYKLKMIHGFTCSHFLLMVCAFVVFSDILKRVPDKLHVTKKAVLHVFPAALPQSLRLSCLCPRRQLSGLDVPFHAAPTSTHTPTVVTPCSSTRRSMVSQPVKTFFAITMYGTANSHFTSVVWKASTNSNALFLIAAAHNLLCLKLGKEIGVSIGNP

SEQ ID NO: 80577 - protein, 56 aa, Zea mays
  Coding DNA Sequence Number=SeqID_38798
  Homolog annotation: Hit_ID=Q8GU89; Match level="QueryCoverage=68%, HitCoverage=2%, E-value=8e-08, Identity=69%"; Hit description =Pleiotropic drug resistance protein 4
MPCPENSIDKFIVNKMLSRREKATNFKPDYDIDIHMKVLAMSGQESSILTGYKLKC

SEQ ID NO: 80578 - protein, 104 aa, Zea mays
  Coding DNA Sequence Number=SeqID_38799
  Subcellular localization annotation: CTP_CleavageSite=79; ConfidenceScore=5.47e-01
METFGLHNPMADGSLEWLSPRSSTSTNTTSLGNRSLGHKSLSAPVGEERLSANSNISLLWCSSPSSISFDCSTSAALPMVATEREMSLWAISKYFGDLVSNTSA

SEQ ID NO: 80579 - protein, 142 aa, Zea mays
  Coding DNA Sequence Number=SeqID_38800
MGSAADVEQSNEMLDGLEHHSRLMLLLADSRSSPTGAERDLRKFLLEPITEGPDICQIDGCSVKLEYKRRQVKYGLCDNIWPWKYLVPCTREDLFATITRLTNNSYFDGAHEVRHYVRKHSDLGRIVLEVAKDSQIPRQANC

SEQ ID NO: 80580 - protein, 280 aa, Zea mays
  Coding DNA Sequence Number=SeqID_38801
  Homolog annotation: Hit_ID=Q5EUD0; Match level="QueryCoverage=23%, HitCoverage=12%, E-value=3e-24, Identity=88%"; Hit description =Protein disulfide isomerase
MEHMRFDIMSGSIQILVVLCLKLLRTRKFPAKQTASKLFRGGHDEDDSADADTNDVDVPRNVGVVVLLLLKRYLLRDAIVTWVRKKTGVPIIRLQSKDSAEEFLKKDMTFVIGLFKIFEGADHEEFVKAATTDNEIFTFAEAYDFEDLESMVEEIGRHSRQSNVKVHNVTIETSLDAPLTDGIVPDSYSNLCIKDNTIIVSHEVISLKNRWDRPHRPWGLHRGRGINRCLESFLSPNGKQDIVGLEARNNDTARPYNSFRTNDVPTCGSTGGESDADTYG

SEQ ID NO: 80581 - protein, 149 aa, Zea mays
  Coding DNA Sequence Number=SeqID_38802
MELLMAIACNVKVHNVTIETSLDAPLTDGIVLDHIYTGIEEYVYSRTKKSRKSPSRNDKHMNKIVLSEHDDHKYGDLEPKTFRMCSHHVGLVGLGLLQSALLPELAACAEPSAGGNEERSCLLRSRVAPAAVAGHRRRTEGLVLEDIER

SEQ ID NO: 80582 - protein, 216 aa, Zea mays
  Coding DNA Sequence Number=SeqID_38803
  Homolog annotation: Hit_ID=Q4LD47; Match level="QueryCoverage=37%, HitCoverage=14%, E-value=5e-11, Identity=43%"; Hit description=LysM receptor-like kinase
  Subcellular localization annotation: CTP_CleavageSite=75; ConfidenceScore=5.30e-01
MGCDLALGSYHITPNQNLTPYNTGYPSLPGLHPSRQPRKRLFSPAAASCLVLPFAPFSTYLAGSFHYRVSGGESYASIAGRVLPLPQPQHGDLAADRPNEQRQRRPGRRHGGDPNVSPEYRLLLLYSNIWYQSQFSAITMSHKSPSMKRPTDDSDGENKVRPSRSPPQRRGRSYSCRRSSSRIVERVIERPSANVAWPMLTRTNYSEWAPVMQVNF

SEQ ID NO: 80583 - protein, 165 aa, Zea mays
  Coding DNA Sequence Number=SeqID_38804
MGCDLALGSYHITPNQNLTPYNTGYPSLPGLHPSRQPRSPEAKATPASRDVYYHYHNLSMATLLQTAPTSSVSGVLDAGTVSQFSAITMSHKSPSMKRPTDDSDGENKVRPSRSPPQRRGRSYSCRRSSSRIVERVIERPSANVAWPMLTRTNYSEWAPVMQVNF

SEQ ID NO: 80584 - protein, 373 aa, Zea mays
  Coding DNA Sequence Number=SeqID_38805
MGLGVCGSLCQGGDEDDGFDNAYGTGKWYSFRLEMVVSVATTAQVKMKSWRRTSRSSKSTMSSRRGLAANPQSAATMAHLRCTARKSVIPFLPSRLAEQEIESVRSCSPVLPLEAPPAPPLSAPATGVAVGGDLDDGGGDSSSSHDPDLSEKQELEGWVARPITRDAARGCHFHGALDILLCQALDRRTWSIEYRCVVFQHSHGIYPDRWEATCLVRCPENSLWGAEVCSEHYSISERDSAEAAMQDAARRALSHYCSVLGGVADGLNLKYYPCRPSGSTRGVVVSPIGEDNPRLSSTVNLAAVLNTELDHALDELSRARGEIARLRAERAEHRHLEDGSPAHVGTQHPYRSPRRGHQTYGNPDCRTRINLEP

SEQ ID NO: 80585 - protein, 349 aa, Zea mays
  Coding DNA Sequence Number=SeqID_38806
  Subcellular localization annotation: CTP_CleavageSite=36; ConfidenceScore=5.14e-01
MNAVVTSHPPVCLYSTAGRKAKRWNCYTRRAVTHTRCAVDRKDKTVTLQGGTDTRSEVGSFLRNELREGVFWTFGFPKLKRLFSRVKLVTKNDLAPRKGLLLGSCFGAPKVSHEEAASAEVVSKRWPKYNGSSSLISCEKQTIQIEFLSLQVTALVPTITGMGDHVSGRVRMAICGQVHSGAPWRLLPLLGVLEGGLLFFPVREGFPAHEQRGRVVPWLPQRASAKGTAPCALLLTPWRRGGVGQRKKKGLGAMDEELQRAEEGGAESTQGDGGSRHGRRRRAELLASCAPTMEEGVGMPAAMEQGNREPREGAPSTGGRGRRSTSAGQPTPEGSWAAMGGEEAPYTQP

SEQ ID NO: 80586 - protein, 99 aa, Zea mays
  Coding DNA Sequence Number=SeqID_38807
MARLSWERGVAVLCWPKLLLACRGSGARFHGRRRAGDAMVVEVLGCCRDGARPCRKEPRGGAPSTGGRGRRSTSAGQPTPEGSWAAMGGEEAPCWLLLP

SEQ ID NO: 80587 - protein, 79 aa, Zea mays
  Coding DNA Sequence Number=SeqID_38808
MERRGMSIIKDGAKAMIVTDKGENATKVRIGKTPFSNRDGKDDNSKGDYEIDGFGYDYGAGEDEAVEGDFREFQEYDEF

SEQ ID NO: 80588 - protein, 74 aa, Zea mays
  Coding DNA Sequence Number=SeqID_38809
MEARGMSIIKDGAKAMIVTDKGENATKVRIGKTPFSIRDGKDDNSKELRQDLLRDEVKKTIKDKISEVPTEELK

SEQ ID NO: 80589 - protein, 127 aa, Zea mays
  Coding DNA Sequence Number=SeqID_38810
MQDRGMSIVKDGAKTMIVTDKGENATKVRIGKTPFSNRDGKDDISKDKDVGEEVNGHRNKGYKYLKDGVKTRPASGKEEDTSKGHIGIKMSIKARSIDDQGMVIANKNTSKDGIKTKLVRRQGGKRN

SEQ ID NO: 80590 - protein, 117 aa, Zea mays
  Coding DNA Sequence Number=SeqID_38811
MERRGMSIIKDGAKAMIVTDKGENATKVRIGKTPFSNRDGKDDNSKGRHKISIMERSSDYKGDNRQTQPRRYFRQNVRGIKEWEAINGEVGEALSSNSNEKEVALKGRFKVSMRARA

SEQ ID NO: 80591 - protein, 88 aa, Zea mays
  Coding DNA Sequence Number=SeqID_38812
MEARGMSIIKDGAKAMIVTDKGENATKVRIGKTPFSNRDGKDDISKGRHRISIMERSSDDKDGVKIRPADEKEGGTSNGQIGKQPLSN

SEQ ID NO: 80592 - protein, 89 aa, Zea mays
  Coding DNA Sequence Number=SeqID_38813
MEARGMSIIKDGAKAMIVTDKGENATKVRIGKTPFSNRDGKDDISKGRHRISIMERSSDDKESRQDSPNGKVEKTIKDKISEVPTEELK

SEQ ID NO: 80593 - protein, 84 aa, Zea mays
  Coding DNA Sequence Number=SeqID_38814
MSIIKDGAKAMIVTDKGENATKVRIGKTPFSNRDGKDDISKGRHRISIMERSSDDKESRQDSPNGKVEKTIKDKISEVPTEELK

SEQ ID NO: 80594 - protein, 36 aa, Zea mays
  Coding DNA Sequence Number=SeqID_38815
MERSSDDKESRQDSPNGKVEKTIKDKISEVPTEELK

SEQ ID NO: 80595 - protein, 68 aa, Zea mays
  Coding DNA Sequence Number=SeqID_38816
MEEKAFKGRFKVSMKEGRLKILENGHSLISKVRLKDEKGKESRQDSPNGKVEKTIKDKISEVPTEELK

SEQ ID NO: 80596 - protein, 69 aa, Zea mays
  Coding DNA Sequence Number=SeqID_38817
MADISVSNTGRAKSGGWLVEVDFLAGVTGHRYGPPCVVGGPPVLANLGEDPAASLSLISISCSSSYLKA

SEQ ID NO: 80597 - protein, 150 aa, Zea mays
  Coding DNA Sequence Number=SeqID_38818
MAGCSTPLSFELELSSARFSYHTDHGGRHICSHPDSRQQRALRCRFGTSPGHQGGAQGRAKSGGWLVEVDFLAGVTGHRYGPPCVIGSPPVLANLGEDPAASLSLISISCSSSYLKLDYCVDRAESRQWRSAVGSLNPELLQIRVRSPEV

SEQ ID NO: 80598 - protein, 79 aa, Zea mays
  Coding DNA Sequence Number=SeqID_38819
  Subcellular localization annotation: CTP_CleavageSite=55; ConfidenceScore=5.15e-01
MEQRITRSTLTGGRAKSGDRGLASPAKQTPIPCSGSFTESASNTWLFACAPVLPSAERPKRTNLALGPVRDLFPAPRAT

SEQ ID NO: 80599 - protein, 134 aa, Zea mays
  Coding DNA Sequence Number=SeqID_38820
MEQRITRSTLAGGRVESGDRGLACPTKQTSIPRSGSFTEVCTVFSEGWTGLGRVLLARSTVAGGSGGRRHAVHGQTSVGLGSGEVKRVRRGTVKSASNTWLFASARVLPSAERPKRTNLALEPVRDLFPAPRAT

SEQ ID NO: 80600 - protein, 187 aa, Zea mays
  Coding DNA Sequence Number=SeqID_38821
HLERLHHRLHKVQERRRQELEQQGSSSSPQQKVESARRCSPVAPLEAPPAPPLGVPAARVAARGDPDDGYDDDGLRGAVVCSEHYSISKWDSAKVAMQDVARRVLSHYCSLLGGVVGGLDLRYYPRRPSGSTGGMIVSPVGEDNPRLSSTFNLAAMLNTELDHALDELGRARTEIAHVGDLFSNAMS

SEQ ID NO: 80601 - protein, 40 aa, Zea mays
  Coding DNA Sequence Number=SeqID_38822
  Homolog annotation: Hit_ID=Q2R3K3; Match level="QueryCoverage=73%, HitCoverage=6%, E-value=1e-09, Identity=100%"; Hit description =Serine palmitoyltransferase 2, putative, expressed
MVRLPYTTALTTLFSYGLLFAFGQLRDFFRSGLSALEGPS

SEQ ID NO: 80602 - protein, 78 aa, Zea mays
  Coding DNA Sequence Number=SeqID_38823
  Gene Ontology: Mol. function=oxidoreductase activity, acting on the CH-OH group of donors, NAD or NADP as acceptor; Cellular component =mitochondrion; Biological process=metabolic process
  Homolog annotation: Hit_ID=Q9ZRI8; Match level="QueryCoverage=65%, HitCoverage=12%, E-value=5e-09, Identity=64%"; Hit description =Formate dehydrogenase, mitochondrial precursor
MEIGGGAYLNLKPGRATTNETLAVEQIRKEERGMPALAPFPFGNVAWMKKGVIVVNNARGAIMDAQAVADACSSGHID

SEQ ID NO: 80603 - protein, 448 aa, Zea mays
  Coding DNA Sequence Number=SeqID_38824
  Homolog annotation: Hit_ID=Q9ZRI8; Match level="QueryCoverage=25%, HitCoverage=31%, E-value=4e-38, Identity=67%"; Hit description =Formate dehydrogenase, mitochondrial precursor
  Pfam annotation: Domain name=2-Hacid_dh_C; Domain location=263-408; Score=-56.8; E_value=4.5e-05; Accession=PF02826.9; Description=D -isomer specific 2-hydroxyacid dehydr
MWTSVVSSWLVQELRLYVASAALSCLVLFAGLCHLDPTRNGNGGYGKPVGTQNPHGYGFGQNFIPIMGRNSRRRKPPQFPWLPCDYISAPAPGLEAAYTPPSLDATTAAADVATAKSSSDAVTWAGVWALPSRQRACIAVCIATFIACTTFTLTMPPPCSIGWGRKMDLMQQLGHDLDQEEPRTYRHSHVGSPIANSPPGAWAQYSSPTDSNMLQAFTRSPTGNGMSPIRIPSLISNAPKIAPIGKDSNRSKYDQVFSNGIVGGLLLGMANRASVNPGSSLIGSRPGEWSRTTDGEQRLGDGARRLGMEIGGGAYLNLKPGRATTNETLAVEQIRKEERGMPALAPFPFGNVAWMKKGVIVVNNARGAIMDAQAVADACSSGHIDASTKGSDHPWRYMPNNAMTPHISGTTIDVQLRYADGVRDMLDRYFKGEDFPVQNYIVKEGQLA

SEQ ID NO: 80604 - protein, 356 aa, Zea mays
  Coding DNA Sequence Number=SeqID_38825
  Subcellular localization annotation: CTP_CleavageSite=68; ConfidenceScore=5.44e-01
MSSRSLMHRVFPPSKPPDGGYPPSFRLIVGGTQLRGSWYLSAIVRLQGFSSCSPAAPLRRWSPKMVTSSLMVGESEPGCGLCPSLSLKDFHHQGWGGESAELGCTVPGSRTRVASEPLAAPASATTAGRGSSAGEIARAGHGPTSNSTAFCPSLPHEFGHGRGPPGSSIRPEVSAAAVRPPGAEVVVVAAAGAGDGVPFVGLLLLCRPSPIEWGCSYLRRGNRSSVCNGTLNANSPVDYLNRFTKHESPRVKVTSESGDPRTASPSEARSDLAEGVVDAEGATAPFQRPDPSLDVCASESCFSRKVMSEKVTSEKARKIFWQKRSFFEENFNAEGVPPLLAPKGGSGFAEARPTLP

SEQ ID NO: 80605 - protein, 356 aa, Zea mays
  Coding DNA Sequence Number=SeqID_38826
  Subcellular localization annotation: CTP_CleavageSite=68; ConfidenceScore=5.32e-01
MSSRSLMHRVLSTFQAPGWGIPAVFRLIVGGTQLRGSWYLSAIVRLQGFSSCSPAAPLRRWSPKMVTSSLMVGESEPGCGLCPSLSLKDFHHQGWGGESAELGCTVPGSRTRVASEPLAAPASATTAGRGSSAGEIARAGHGPTSNSTAFCPSLPHEFGHGRGPPGSSIRPEVSAAAVRPPGAEVVVVAAAGAGDGVPFVGLLLLCRPSPIEWGCSYLRRGNRSSVCNGTLNANSPVDYLNRFTKHESPRVKVTSESGDPRTASPSEARSDLAEGVVDAEGATAPFQRPDPSLDVCASESCFSRKVMSEKVTSEKARKIFWQKRSFFEENFNAEGVPPLLAPKGGSGFAEARPTLP

SEQ ID NO: 80606 - protein, 131 aa, Zea mays
  Coding DNA Sequence Number=SeqID_38827
  Subcellular localization annotation: CTP_CleavageSite=76; ConfidenceScore=5.71e-01
MADSPHLLSPQPAPPSLLLSSASPTRSSSSELSETIIRGTLKTPNSQLSRSDRSHFAAPLTGLTKGQRRLRRFDCCAARQSEADRQSGPASGTIGNSAPPDPGLGLGLSPGRRRTPLRPTQGSDSGSVPED

SEQ ID NO: 80607 - protein, 224 aa, Zea mays
  Coding DNA Sequence Number=SeqID_38828
  Homolog annotation: Hit_ID=Q7FS86; Match level="QueryCoverage=32%, HitCoverage=83%, E-value=3e-12, Identity=58%"; Hit description =Putative response regulator
MAARAEATGDGVNPPWQGRSYCKGENPGLCITIGSPDHPPTRFRPAYYVHRAHDPTHALAVIQSHAATIKTPPRRQGLGFSGGGGSLKRASVSDPRGQQRCRPEAGDLRRRSTRNERQRRSRGGRASGDGVLEADGRRQRTLGPMATTFVPFVSAMATTAAAPTSVASSPAPKANNSRKAVVPRMTGYKLPKRVKESAVLRDILVVIMSSENVPTRIIPLPGGV

SEQ ID NO: 80608 - protein, 224 aa, Zea mays
  Coding DNA Sequence Number=SeqID_38829
  Homolog annotation: Hit_ID=Q7FS86; Match level="QueryCoverage=32%, HitCoverage=83%, E-value=3e-12, Identity=58%"; Hit description =Putative response regulator
MAARAEATGDGVNPPWQGRSYCKGENPGLCITIGSPDHPPTRFRPAYYVHRAHDPTHALAVIQSHAATIKTPPRRQGLGFSGGGGSLKRASVSDPRGQQRCRPEAGDLRRRSTRNERQRRSRGGRASSDGVLEADGRRQRTLGPMATTFVPFVSAMATTAAAPTSVASSPAPKANNSRKAVVPRMTGYKLPKRVKESAVLRDILVVIMSSENVPTRIIPLPGGV

SEQ ID NO: 80609 - protein, 173 aa, Zea mays
  Coding DNA Sequence Number=SeqID_38830
  Homolog annotation: Hit_ID=Q7FS86; Match level="QueryCoverage=41%, HitCoverage=83%, E-value=2e-12, Identity=58%"; Hit description =Putative response regulator
  Subcellular localization annotation: CTP_CleavageSite=74; ConfidenceScore=5.53e-01
AHDPTHALAVIQSHAATIKTPPRRQGLGFSGGGGSLKRASVSDPRGQQRCRPEAGDLRRRSTRNERQRRSRGGRASSDGVLEADGRRQRTLGPMATTFVPFVSAMATTAAAPTSVASSPAPKANNSRKAVVPRMTGYKLPKRVKESAVLRDILVVIMSSENVPTRIIPLPGGV

SEQ ID NO: 80610 - protein, 130 aa, Zea mays
  Coding DNA Sequence Number=SeqID_38831
MVYRLLGWDAPVFGGRICAGAILLGELAAESSCVLSSLAGAWPCGSDAPQPVLGFKDVHRPRGGGERAEPRLRLPHGLVTRLFLQHSEEEDDHQPCEGGKLRLRGPGQTASTAFHRASSSMAWMVLSSPP

SEQ ID NO: 80611 - protein, 79 aa, Zea mays
  Coding DNA Sequence Number=SeqID_38832
MTTSASSGSPVEATTSATGCLTSGDDHLCAGQPPQRWRPPQHALHGKEVLASVPLRGRGQDHPSHGAGSMAEGGACGLA

SEQ ID NO: 80612 - protein, 625 aa, Zea mays
  Coding DNA Sequence Number=SeqID_38833
  Gene Ontology: Mol. function=ATPase activity, coupled to transmembrane movement of ions, phosphorylative mechanism; Cellular component=membrane; Biological process=metabolic process
  Homolog annotation: Hit_ID=Q94IM7; Match level="QueryCoverage=99%, HitCoverage=93%, E-value=0.0, Identity=88%"; Hit description=P-type ATPase
  Pfam annotation: Domain name=Cation_ATPase_C; Domain location=415 -611; Score=262.4; E_value=9.1e-76; Accession=PF00689.11; Description= Cation transporting ATPase, C-terminus
  Pfam annotation: Domain name=Hydrolase; Domain location=55-319; Score= 59.4; E_value=1.1e-14; Accession=PF00702.16; Description=haloacid dehalogenase-like hydrolase
  Pfam module annotation: Pfam domain module=Cation_ATPase _C::Hydrolase; Domain location=415-611::55-319
MDENLQMIGKIAAVCNDASIAHSEHQYVATGMPTEAALKVLVEKMGLPGGYTPSLDSSDLLRCCQWWNNAAKRVATLEFDRTRKSMGVIVKANSGKNLLLVKGAVENLLERCTHIQLLDGSVVLLDDGAKALILSTLRDMSASALRCLGFAYKDELSEFATYDGEEHAAHKYLLDPSYYSSIESNMIFCGFVGLRDPPREEVHKAIEDCRAAGIRVMVITGDNKETAEAICREIGVFGPHEDISSKSFTGKEFMGLSDKKELLRQQGGLLFSRAEPKHKQEIVRLLKEDGEVVAMTGDGVNDAPALKLADIGVAMGITGTEVAKEASDMVLADDNFSTIVAAVGEGRSIYNNMKAFIRYMISSNIGEVASIFLTSALGIPEGLIPVQLLWVNLVTDGPPATALGFNPPDKDIMKKPPRRSDDSLITPWILFRYMVIGLYVGVATVGIFIIWYTHDSFLGIDLASDGHTLVSYSQLSNWDKCSSWEGFKVSPFTAGARTFSFDANPCDYFQGGKIKATTLSLSVLVAIEMFNSLNALSEDGSLVSMPPWVNPWLLLAMSVSFGLHFLILYVPFLAQVFGIVPLSLNEWLLVVAVAFPVVLIDEVLKFVGRCLTARARKQSGKRKAE

SEQ ID NO: 80613 - protein, 1062 aa, Zea mays
  Coding DNA Sequence Number=SeqID_38834
  Gene Ontology: Mol. function=hydrolase activity, acting on acid anhydrides, catalyzing transmembrane movement of substances; Cellular component=integral to endoplasmic reticulum membrane; Biological process=calcium ion transport
  Homolog annotation: Hit_ID=P92939; Match level="QueryCoverage=99%, HitCoverage=100%, E-value=0.0, Identity=75%"; Hit description =Calcium-transporting ATPase 1, endoplasmic reticulum-type
  Pfam annotation: Domain name=Cation_ATPase_C; Domain location=852 -1048; Score=262.4; E_value=9.1e-76; Accession=PF00689.11; Description=Cation transporting ATPase, C-terminus
  Pfam annotation: Domain name=Cation_ATPase_N; Domain location=21-103; Score=110.2; E_value=6e-30; Accession=PF00690.16; Description=Cation transporterATPase, N-terminus
  Pfam annotation: Domain name=E1-E2_ATPase; Domain location=122-378; Score=378.5; E_value=1e-110; Accession=PF00122.10; Description=E1-E2 ATPase
  Pfam annotation: Domain name=Hydrolase; Domain location=382-756; Score=83.6; E_value=6.1e-22; Accession=PF00702.16; Description =haloacid dehalogenase-like hydrolase
  Pfam module annotation: Pfam domain module=Cation_ATPase_C::Cation _ATPase_N::E1-E2_ATPase::Hydrolase; Domain location=852-1048::21 -103::122-378::382-756
MGKGGQDEGNRRRDGSAASGPDRPAPVFPAWARTPSECLAELGVSADRGLSSEEAAARLQRHGPNELERHAPPSVWKLVLEQFNDTLVRILLLAAVVSFVLALYDGAEGGEVGLTAFVEPLVIFLILIVNAVVGVWQESNAEKALEALKEIQSEHATVRRDGRWSHGLPARDLVPGDIVELRVGDKVPADMRVLQLISSTLRVEQGSLTGETASVNKTSHKIELEDTDIQGKECMVFAGTTVVNGSAVCVVTGTGMATEIGKIHAQIQEASQEEDDTPLKKKLNEFGEALTAIIGVICALVWLINLKYFLSWEYVDGWPTNFKFSFEKCTYYFEIAVALAVAAIPEGLPAVITTCLALGTRKMAQKNALVRKLPSVETLGCTTVICSDKTGTLTTNQMSAVKLVAIGRWPDTLRSFKVDGTTYDPTDGKIHDWPSLSMDENLQMIGKIAAVCNDASIAHSEHQYVATGMPTEAALKVLVEKMGLPGGYTPSLDSSDLLRCCQWWNNAAKRVATLEFDRTRKSMGVIVKANSGKNLLLVKGAVENLLERCTHIQLLDGSVVLLDDGAKALILSTLRDMSASALRCLGFAYKDELSEFATYDGEEHAAHKYLLDPSYYSSIESNMIFCGFVGLRDPPREEVHKAIEDCRAAGIRVMVITGDNKETAEAICREIGVFGPHEDISSKSFTGKEFMGLSDKKELLRQQGGLLFSRAEPKHKQEIVRLLKEDGEVVAMTGDGVNDAPALKLADIGVAMGITGTEVAKEASDMVLADDNFSTIVAAVGEGRSIYNNMKAFIRYMISSNIGEVASIFLTSALGIPEGLIPVQLLWVNLVTDGPPATALGFNPPDKDIMKKPPRRSDDSLITPWILFRYMVIGLYVGVATVGIFIIWYTHDSFLGIDLASDGHTLVSYSQLSNWDKCSSWEGFKVSPFTAGARTFSFDANPCDYFQGGKIKATTLSLSVLVAIEMFNSLNALSEDGSLVSMPPWVNPWLLLAMSVSFGLHFLILYVPFLAQVFGIVPLSLNEWLLVVAVAFPVVLIDEVLKFVGRCLTARARKQSGKRKAE

SEQ ID NO: 80614 - protein, 103 aa, Zea mays
  Coding DNA Sequence Number=SeqID_38835
MGRSRGTTWPGKMIHPRVHHWHRTSTEEHWTFVRTTRILDYRPGIPRRHVGSLGWAPGPSEKGSDRSKCPTQVPKCKKVDKVQIKDKGKIQLKKPWLEQPRLC

SEQ ID NO: 80615 - protein, 148 aa, Zea mays
  Coding DNA Sequence Number=SeqID_38836
MAPGETVKLGRCHNNSLAVDNAPGVALDGVRDGKLLVEGTMGTVHRMARVHCLACHLLDDPDARLHGFRGLTSGSAHWIMSRVTSHAAAEGLRLSEERRARPGRVPAPDPYSCWGPPRPGTLPRPGPYSEGPGAHPRDPTSLLGSSGL

SEQ ID NO: 80616 - protein, 501 aa, Zea mays
  Coding DNA Sequence Number=SeqID_38837
MTTASPRAERSSPPSPYGGEDKTIQERDRHLHGVRRLVRPLGDAGGGAKAIQAREPDTLQLTALAADRPHVAEVRLLRKMTTGERVQSGCMMKILEAERWQKSANPHVVALLQQQQEEDKIDRTTAQETKSASSPMAPHVIQAGPKHEEGESSHRERATALRLYTLPSSPQPAVKEANRRTRSVQPPCGYSPFHLHRNQRSRRRTAAQGACNRPAVVRPLGFDRWSNLWHGGPGPHDMHPVRRFLGAEKSHRRSRQYRASSRPSQKAEKINFQNQCSDPRHPVHGPTKALSAEVTGQSAMGAGMVVGVTMGGPVVIASTGAQEQRANHQSNFGPTCRLASSPEAGPGATVVEPDLREGAPDPCTHNSDPRLWPGTPERRPDAATWLIARDISQRAEPDAMCPLSIYCVLSTSLASGASVTLQMAHLSSPLSKQCARAARCIVLIIPYTRSFPCASRIRRSRVSGYKKIAPAANIRSSKYYFCEVPRPTCRGPALLYMPLWL

SEQ ID NO: 80617 - protein, 518 aa, Zea mays
  Coding DNA Sequence Number=SeqID_38838
MDPQGTPCSPVYGVKACLPPETLLDSPWVQTSDRFMQKWPQSKTRAPSSNADGNPGSGPSPTASTKPRRAPQLSPSWEGPFKVTGIRRLEGDRLAATEGVPPPGAGASLYKLPDASEVTLESPRPLPLRNPPRWCDNGDGRLNACAIPKRSSPPSSYGGDNEAIKAKEWEARRGRTAAPRLAVAGDAGGGAKAIQAREPDTLQLTALAADRPHVAEVRLLRKMTTGERVQSGCMMKILEAERWQKSANPHVVALLQQQQEEDKIDRTTAQETKSASSPMAPHVIQAGPKHEEGESSHRERATALRLYTLPSSPQPAVKEANRRTRSVQPPCGYSPFHLHRNQRSRRRTAAQGACNRPAVVRPLGFDRWSNLWHGGPGPHDMHPVRRFLGAEKSHRRSRQYRASSRPSQKAEKINFQNQCSDPRHPVHGPTKALSAEVTGQSAMGAGMVVGVTMGGPVVIASTGAQEQRANHQSNFGPTCRLASSPEAGPGATVGTLDKGYPLLQYKDVVLICRSLATR

SEQ ID NO: 80618 - protein, 186 aa, Zea mays
  Coding DNA Sequence Number=SeqID_38839
MGGFPWRWDLRRGIRAATSFDPSRIQGEAPEPVLEPSLLASARVNTVAQGTSHEQIREGDDVLPAGGLPDRLAAKGSDNRGTGRWDYQGEGEKNSRAPAFNHKRGGVGVTNPTPLKNNLVLEISKQKGYTEVRREMVRVRLADGKKNLVREDSVQGDAIVDITPQLITLNQRSKSNKYHKNKHSSS

SEQ ID NO: 80619 - protein, 119 aa, Zea mays
  Coding DNA Sequence Number=SeqID_38840
MGGFPWRWDLRRGIRAATSFDPSRIQGEAPEPVLEPSQLASARVNTVAQGTSHEQIREGDDVLPAGGLPDRLAAKGYDNRGSGRWDYQGEGEKNSRAPAFNHKRGGGQPDSPGSTSRGR

SEQ ID NO: 80620 - protein, 100 aa, Zea mays
  Coding DNA Sequence Number=SeqID_38841
MFYRRVDSQIASRPRGLTTEGAGDGITKGKARRTQGLQLLTTSAEEVDPIPPEAHREVVELAPRSPRALPPWTGKVVGFAADNSGPRASGSSTAAVHATG

SEQ ID NO: 80621 - protein, 119 aa, Zea mays; identical to SEQ ID NO: 80619
  Coding DNA Sequence Number=SeqID_38842

SEQ ID NO: 80622 - protein, 100 aa, Zea mays
  Coding DNA Sequence Number=SeqID_38843
MAVPDMSCRREGPVRRRCSLARVRDGSCGVDHARHTCPGPQNNSLAGLEGNRKAAFYFSHVIGHGGQQARSIIDSRHDKRSRILCRVRVHADMIRWLRRR

SEQ ID NO: 80623 - protein, 262 aa, Zea mays
  Coding DNA Sequence Number=SeqID_38844
  Homolog annotation: Hit_ID=Q6QP51; Match level="QueryCoverage=29%, HitCoverage=40%, E-value=7e-11, Identity=48%"; Hit description =Putative growth-regulating factor 1
  Subcellular localization annotation: CTP_CleavageSite=71; ConfidenceScore=5.70e-01
MASPCGVVSPSEVVTPPRSMSSPSPGVGRGGDLLPESRSSPSPGVGRGRDRRPSRGRVRARGSGETEIVVRVEVESEPRGRARRRSSSELRSSPSPGVGEAEIPMAPEAGLGCCQPHPGGWHSSRSSAGGAVFLSGRLVEGQSDCGHFGLVDWKARIRIRCEEILALNAPAIRSAWRGGLGKGCFFVKPARAWPRASRRCIVRFRVLGLPGLREQPPSLCTGREDGQGQTRISSYAPASPFRKEEGGKHHVALGGRRTWCLQ

SEQ ID NO: 80624 - protein, 221 aa, Zea mays
  Coding DNA Sequence Number=SeqID_38845
  Homolog annotation: Hit_ID=Q6QP51; Match level="QueryCoverage=34%, HitCoverage=40%, E-value=5e-11, Identity=48%"; Hit description =Putative growth-regulating factor 1
  Subcellular localization annotation: CTP_CleavageSite=62; ConfidenceScore=5.64e-01
PSEVVTPPRSMSSPSPGVGRGGDLLPESRSSPSPGVGRGRDRRPSRGRVRARGSGETEIVVRVEVESEPRGRARRRSSSELRSSPSPGVGEAEIPMAPEAGLGCCQPHPGGWHSSRSSAGGAVFLSGRLVEGQSDCGHFGLVDWKARIRIRCEEILALNAPAIRSAWRGGLGKGCFFVKPARAWPRASRRNPRLLCDEPKPEAAVSAWTEAELAGEETSST

SEQ ID NO: 80625 - protein, 85 aa, Zea mays
  Coding DNA Sequence Number=SeqID_38846
MGQNGSRQPNSLVELVVVVEVVVVVVSPTALALFLGGPDVFPRVLVLSDFASRSPDVIVDITPQLITLNQKSKSNMYHKNKHPNT

SEQ ID NO: 80626 - protein, 114 aa, Zea mays
  Coding DNA Sequence Number=SeqID_38847
MAVKSMYHRMRHVEDAVMSSKGKIITQQQTEMNSPNPPPVETDQVVAAQRLVIQQLTDLVIEMQNQIRQEREEIRQVRQEIRQARLERQQQQQPPPPPPAPPSYINIYINYYHL

SEQ ID NO: 80627 - protein, 81 aa, Zea mays
  Coding DNA Sequence Number=SeqID_38848
MNPPNPPPVEINQVVAAQRLVIQQLTDLVTEMQNQIRQEREEIRQVRQEIRQARLERQQQQQPPPPPPAPPSYIDINYDDL

SEQ ID NO: 80628 - protein, 87 aa, Zea mays
  Coding DNA Sequence Number=SeqID_38849
MNPPNPPPVEIDQVVAAQRLVIQQLTDLVTEMQNQIRQEREEIRQVRQEIRQARLERQQQQQPPPPPPAPPSYIDINYDDLRNNKVY

SEQ ID NO: 80629 - protein, 110 aa, Zea mays
  Coding DNA Sequence Number=SeqID_38850
MSVDLWCAVVEHRNGGRWLRVDRVACVVEDWWDTRLIVEDVHEVRCSRQVWWFGLQNHPALRMAGFTEFGPQNSAVAVPEGTGGGTRHDRGGCVKAKQLRVKDVAVGSKT

SEQ ID NO: 80630 - protein, 55 aa, Zea mays
  Coding DNA Sequence Number=SeqID_38851
MAEVKVMQARADKPKAVKVAAVVSKGAGGGTWHDRGGCVKAKQLCVKDVVVGSKT

SEQ ID NO: 80631 - protein, 266 aa, Zea mays
  Coding DNA Sequence Number=SeqID_38852
  Gene Ontology: Mol. function=hydrolase activity, acting on acid anhydrides, catalyzing transmembrane movement of substances; Cellular component=integral to membrane; Biological process =metabolic process
  Homolog annotation: Hit_ID=Q7XPY2; Match level="QueryCoverage=98%, HitCoverage=33%, E-value=1e-111, Identity=69%"; Hit description =Plasma membrane ATPase
MPKTSLAVEKNRPNIVIYAVSITIHIVLGFMLIALIWQYDFSPFTVLIIAILNDGTIMTISKDRVKPSPLPDSWKLKEIFVTGIDKFGVRSIRDSEHKMMSALYLQVSIVSQALIFVTRSRSWSFVERPGLLLVTAFLLAQLVATFLAVYANWGFARIKGIGWAGVVWLYSIVFYFPLDLIKFFIRFVLSGRAWDNLLENKPPEASSNTLFNDKSSYRELSEIAEQAKRRAEIARLRELNTLKGHVESVVKLKGLDIDTIQHNYTV

SEQ ID NO: 80632 - protein, 389 aa, Zea mays
  Coding DNA Sequence Number=SeqID_38853
  Gene Ontology: Mol. function=hydrolase activity, acting on acid anhydrides, catalyzing transmembrane movement of substances; Cellular component=integral to membrane; Biological process =metabolic process
  Homolog annotation: Hit_ID=Q7XPY2; Match level="QueryCoverage=77%, HitCoverage=33%, E-value=1e-128, Identity=74%"; Hit description =Plasma membrane ATPase
MPKTSLAVEKNRPNIVIYAVSITIHIVLGFMLIALIWQYDFSPFTVLIIAILNDGTIMTISKDRVKPSPLPDSWKLKEIFVTGIDKFGVRSIRDSEHKMMSALYLQVSIVSQALIFVTRSRSWSFVERPGLLLVTAFLLAQLVATFLAVYANWGFARIKGIGWAGVVWLYSIVFYFPLDLIKFFIRFVLSGRAWDNLLENKERLLTCSHVHRPAAFTTKKDYGRGEREAQWATAQRTLHGLQPPEASSNTLFNDKSSYRELSEIAEQAKRRAEIARLRELNTLKGHVESVVKLKGLDIDTIQHNYTSNNWVPRREEIKAKIISEIHSEAEKNLGLRPGAASVIRNGRSSPGGPLSPGGGFPMNRSGTGGMMSGMPGSRKMPGMPGLDSR

SEQ ID NO: 80633 - protein, 117 aa, Zea mays
  Coding DNA Sequence Number=SeqID_38854
MERPPEKTVLPQGFMDTCWNLLSAARRPTRVNGGDNRDEAVLRGDVTAGLRLVLNEAKGVPARFVFVKPATAAKGDERRVASLPSPPTFCPPRDQFDKVTWCPKTSLDGGDAALARS

SEQ ID NO: 80634 - protein, 110 aa, Zea mays
  Coding DNA Sequence Number=SeqID_38855
MRTSKPTPAIWIWSSQKGLTPEGLSPETIRIYELVGVPPPPQGTPRWRVWSSPFGPVPAWWPLNFMELEDVWILGTSHLSASSTPSNPTTSSSSSAGAGKDVHPLKCYAA

SEQ ID NO: 80635 - protein, 84 aa, Zea mays
  Coding DNA Sequence Number=SeqID_38856
MRTSKPTPAIWIWSSQKGLTPEGLSPEFGPVPAWWPLNFMELEDVWILGTSHLSASSTPSNPTTSSSSSAGAGKDVHPLKCYAA

SEQ ID NO: 80636 - protein, 86 aa, Zea mays
  Coding DNA Sequence Number=SeqID_38857
MAENVEAVGSAESEEADASAEKRREYWSVDWGHRGRAAQMPIATGSTASGEGMEESSERGAESSGMEESAEIPGVVARLGFCGYGN

SEQ ID NO: 80637 - protein, 86 aa, Zea mays; identical to SEQ ID NO: 80636
  Coding DNA Sequence Number=SeqID_38858

SEQ ID NO: 80638 - protein, 490 aa, Zea mays
  Coding DNA Sequence Number=SeqID_38859
MGTEHGVSGELQAGPTRSEAAVEPFGGPAFEPLISKEARSLVPSRGRILFGHPARRLRDAWAWASTLACRGSEKRVHLAWLHAACMAARLFRPLVWAKVEAPAPQGRTLERVGEDSARDGWRRKQGEWPLKGGRSLSEGDHVFSLPYASRLSTFQAPGWGMPAVFSPYRWRNATPWELVPFSHRSASRIFISQPGCPPRRRSPETVNTSSWVGRSKSGCDLGPTLSFKDVHHPRWGGGRAEPALYLPRGFVGHPLPRCSKERALTGPAGGTDFDNAGLGDGGRRHLQRVGCVGLAPSGPFCRGAAAAPCAREDRPRCRALLGRRSCSGWSCLCTGMAPSRGGRCPTRPGGFEWGSAGEPMAPAVGAEAEAAREVPVADGITATIRASGLRSFVLVLAPRASTAGGGVPLVSLLLLRRPTPIEWGYSPVDYLNRFTKHESPRVKVTSESGDPQTASPSEARSDLAEGVVDAEGAAAPFQRQDPSLQDQSVL

SEQ ID NO: 80639 - protein, 80 aa, Zea mays
  Coding DNA Sequence Number=SeqID_38860
MGAEHGVSGELQAGPTRSKAAVEPFGGPAFEPLISKEARSLVPSRGRILFGVSPFPGEASPAAPARSAACPAAELMRRGE

SEQ ID NO: 80640 - protein, 119 aa, Zea mays
  Coding DNA Sequence Number=SeqID_38861
  Gene Ontology: Mol. function=nucleoside-triphosphatase activity; Cellular component=membrane
  Homolog annotation: Hit_ID=Q2R029; Match level="QueryCoverage=69%, HitCoverage=14%, E-value=6e-21, Identity=57%"; Hit description=AAA -type ATPase family protein, putative, expressed
MTSHDRTFLFIQIPHRHPHVSDPGHHGDASSESSTARQSNAGGRGRMEQQPHGGPSYGYRGRVMLAFEDNGSSKIGVRFDKQIPDAELLRPDFSAGEEVERLAMTELIEVLLLFGTRNP

SEQ ID NO: 80641 - protein, 257 aa, Zea mays
  Coding DNA Sequence Number=SeqID_38862
  Homolog annotation: Hit_ID=Q2R029; Match level="QueryCoverage=40%, HitCoverage=14%, E-value=2e-37, Identity=76%"; Hit description=AAA -type ATPase family protein, putative, expressed
MKGEARAQPGGWGLLVRGSEGRVRAATARVRLKLNLAARARRHNLTGATPPPRAHPAAPRRVPPSLHPPCLQQQNERDLWSPSPGSSPSDSNLVSPSLATRERWGRTRRTRQCSGRGWGPRPTRWAPPTPSKTAWSVPFLSPRRSLFPICTSEFQIPDGNDLGGLCEEDHGFFCSAESLRPDFSAGEEVERLAMTELIEVISEENKSGPLIVLLKDVEKSFIGVTESLSSSRSKFESLPSGVLIIGSHTQMDSRKEK

SEQ ID NO: 80642 - protein, 249 aa, Zea mays
  Coding DNA Sequence Number=SeqID_38863
  Subcellular localization annotation: CTP_CleavageSite=17; ConfidenceScore=5.09e-01
SSIKIRCRSRPKGVVARCTRLWDPTLLAPRGGRRRSSPLGKSVAADPISAVLPVTAPRPSASRGPLLSTSEPPGRASGRAAPCSRWIPPDPRARMSAITVVVRPCRISPPTRVGSAVAQPLQLPHPHGTLGNREIRRARMRSAAAVGPYMVATPAAAAACSASDACAGSASPHGRRHTFGQHPSCWDLPARNRCPAETLIRGWSRSVRDGRPPAGGRSSMTSTRGGGGSSIRNSGDGSQVGGGGSPILR

SEQ ID NO: 80643 - protein, 65 aa, Zea mays
  Coding DNA Sequence Number=SeqID_38864
MGVACSSTLEVPPPQGFGDAAACPHKGLVIARPLDRGAAATDLGTAATTPDRGTSATACRVKIQP

SEQ ID NO: 80644 - protein, 669 aa, Zea mays
  Coding DNA Sequence Number=SeqID_38865
  Gene Ontology: Mol. function=cysteine-type peptidase activity; Biological process=proteolysis
  Homolog annotation: Hit_ID=Q53MK8; Match level="QueryCoverage=32%, HitCoverage=23%, E-value=6e-21, Identity=27%"; Hit description=Ulp1 protease family, C-terminal catalytic domain, putative
MTLDALGSRSHLRWLMDKLDHKDMTIRPGVGKELKITKETVHLILGLPNAGSGKPLGIDEAVAGNNLRAELGLSKDEFVVASLQDRLRKGNDDDLSIRCFFLILFNRLLFPTSSWGISNHEVLLTEEMDRFHEIDWCHLIFNDLCEAAQKWHTRSTSNVSTTIYGCSVVILPPLNKRGTPRIKFFDKNIIQALTKADKRKPRQSGEPFGHCEFRSFSETCYSAVPSVQFQSEHRDRTNIFDVPRPDPCGHHTIHIQLPLIKDMLSSKIKQLQPRDRPKFIEKFVEYDSEVGKACSIIKSTLTKMVVKQYELADTFAELIDDVLRAESGDPDNVAEAPQTDKPPDISQHMSSEEQIHEGTQNTQDMTMPYSQPNTELTGTQFEEIHEKQQQMRRAFEGCPDDLETNITPNAENQGGDIGASHDTPTYTGPLFDQTPSGHVADGEETHSLHTTHDHSLPRLTELDCARSLRDFLCSSKTNPNRKIIEFDECIGNCLDIQQSFADGMCLENVFMQCFIMGFRHDKNNNCSSINKDRLVLDVNVGIFDQTVLDAYLDKTLPQLDNFGDYKTIMVPILHMGHWTLYVINIQFRCIHILDSNPYGPELGAGSNDCGFFVMRYIQYYDYMDGSIKQFIQRENSGDLRSLALYYLTFHSKNKCLPLPPEIQRFKFGR

SEQ ID NO: 80645 - protein, 296 aa, Zea mays
  Coding DNA Sequence Number=SeqID_38866
  Homolog annotation: Hit_ID=Q75KQ9; Match level="QueryCoverage=26%, HitCoverage=11%, E-value=7e-35, Identity=96%"; Hit description =Expressed protein
MRCQVILALNAPAIWSVGVAIWPRLLLGEGWASGEPKLCADGGYQLRLGALGRDELRKDIEQLCMQQAGPGYVSVATRMLTQRTAALEQDIENLQKKLGGCLRENQNLQEELAEAYRIKSQLAELHGAALSKLSLEARDLIGVGAGEVHGPLHSLSACSTTTPGRLGIQDNNIGSGGVWGDDALKIGARVMEVGGGWGIVTQGSRVQVDGVCWSGAPVRRLGASADLGGDLIPTLLGLLRLTREDWGVETGWVVNEPSSSEPRISFEVGVKLKLGSNEAKKGSSLAWLSTTDDILC

SEQ ID NO: 80646 - protein, 226 aa, Zea mays
  Coding DNA Sequence Number=SeqID_38867
  Homolog annotation: Hit_ID=Q75KQ9; Match level="QueryCoverage=37%, HitCoverage=12%, E-value=2e-35, Identity=90%"; Hit description =Expressed protein
MRCQVILALNAPAIWSVGVAIWPRLLLGEGWASGEPKLCADGGYQLRLGALGRDELRKDIEQLCMQQAGPGYVSVATRMLTQRTAALEQDIENLQKKLGGCLRENQNLQEELAEAYRIKSQLAELHGAALSKGSRVQVDGVCWSGAPVRRLGASADLGGDLIPTLLGLLRLTREDWGVETGWVVNEPSSSEPRISFEVGVKLKLGSNEAKKGSSLAWLSTTDDILC

SEQ ID NO: 80647 - protein, 80 aa, Zea mays
  Coding DNA Sequence Number=SeqID_38868
MACCDLSLRAACLFSFGSSKICHGVGFVVWCMKSELLSLGAKLDNDDLSQALELLTRKERYLVSRKIKILVLSDNFPNLL

SEQ ID NO: 80648 - protein, 212 aa, Zea mays
  Coding DNA Sequence Number=SeqID_38869
MTSLWGVYFLGSVYRHILVPLHSVLSSGGVNPDLRVRQRRLHTSHPSLEASLLRIVPADLLGDVCCGEVGAAMLTRKSELLSLGAKLGNDDLSQAIGTTRRGVSGVEQKRCGTCVDVPIQPTDFVVLVGSSVVRRVLMPNPTARCCLGLWHSGRLFAPGARRCGSKLVGEESELPCCWGEGIDATLRSRPSLQSLFRQRQSGQGHPSQDSAL

SEQ ID NO: 80649 - protein, 195 aa, Zea mays
  Coding DNA Sequence Number=SeqID_38870
  Gene Ontology: Mol. function=metal ion binding; Cellular component =integral to membrane; Biological process=ubiquitin cycle
  Homolog annotation: Hit_ID=Q6Z5I2; Match level="QueryCoverage=42%, HitCoverage=25%, E-value=2e-24, Identity=63%"; Hit description=Zinc finger (C3HC4-type RING finger)-like protein
  Subcellular localization annotation: CTP_CleavageSite=61; ConfidenceScore=5.48e-01
MTTTGERQIGQLTWARSQVSIQGAWNGCAQRGSRRTSSPSLNSPRHTAQSPPRPTPRRYSTAAMGRNGGLVEPHCPDVPHVVHHPSTASALLLVAEPSVVGTLSGGRGEAPAASQDEAAAAVEEERGEREREEEEGGEQGDDEEEADGRVAVGDRRARDHRDRGRRGQGVLGAGLAAAGAEGEALERCFRAVEGD

SEQ ID NO: 80650 - protein, 107 aa, Zea mays
  Coding DNA Sequence Number=SeqID_38871
MEKLLASLEASLEDHVGLLAAVAQADVVVTAMSGAHICSHNLSLQHKLFEAIKEAGNIKVKLFLLEKLIIWSEKIKEKFSSNGGSSNFFTLYPDMELFLRKRAVRSQ

SEQ ID NO: 80651 - protein, 423 aa, Zea mays
  Coding DNA Sequence Number=SeqID_38872
  Homolog annotation: Hit_ID=Q5SNH3; Match level="QueryCoverage=11%, HitCoverage=13%, E-value=3e-13, Identity=79%"; Hit description =Putative pollen specific protein SF21
  Pfam annotation: Domain name=DUF212; Domain location=260-407; Score= -28.6; E_value=0.00053; Accession=PF02681.5; Description=Divergent PAP2 family
MHLTLHQSCCPWRKRASGTTFRAHVHCPCLPHARPTQSPTALRNPLPPAVIPAAAAVALRNLCLDKDRGRPPPSIIRTCVAIAPSTPATATRRFASGLAAYDLEVTEPAGSMTTTVTPEAKMAAQQQAPASRSSSRPRRRVPIPAGPRYLRRPLDPAGAGGWMAFVQSVVSNSDDEEDFIIDSRHGQASWLGGRRRTPPLPPQFFRLLAGLSSALNKRTKTMPMRGVDFKCISSGAHIRSHNLSLQHKLVKAIKDAGNIKDVFTREIWRLANARGETIQGETIMYKENRWDAKQLVGSGGMSSSHSATVTALAVAVGLQEGFASSLFATVAVFASVVGSPPRSPSYHHRKPSALPTLAWLLPKVERRALISTARRIDNRKDLTENLKQLQCRTLIFVGENSQFHAEVVHMTAKLDRRYSALVE

SEQ ID NO: 80652 - protein, 127 aa, Zea mays
  Coding DNA Sequence Number=SeqID_38873
  Homolog annotation: Hit_ID=Q98148; Match level="QueryCoverage=70%, HitCoverage=7%, E-value=2e-07, Identity=28%"; Hit description=ORF 73
MGLVESTKITLDNRDDLVVDLSTQLVEKDLEVEQMANHIQELEDQVEARENTIEVLEDQLQNTQQKLEEANQHLNLHHQEIEDMEAEGADEDVDIEGGEEPEPSSSIDTAGSGGPPSPESSVASFAR

SEQ ID NO: 80653 - protein, 169 aa, Zea mays
  Coding DNA Sequence Number=SeqID_38874
  Homolog annotation: Hit_ID=Q98148; Match level="QueryCoverage=52%, HitCoverage=7%, E-value=3e-07, Identity=28%"; Hit description=ORF 73
MSNHPIALFPAEKEDDPMWKDRVEHAKDVWAPYLGHTAHLTLMGLVESTKITLDNRDDLVVDLSTQLVEKDLEVEQMANHIQELEDQVEARENTIEVLEDQLQNTQQKLEEANQHLNLHHQEIEDMEAEGADEDVDIEGGEEPEPSSSIDTAGSGGPPSPESSVASFAR

SEQ ID NO: 80654 - protein, 80 aa, Zea mays
  Coding DNA Sequence Number=SeqID_38875
MAHSAYNQRPFSKHGVDELSFSAKLNFSSVDLLQLQLSFLAELNFSCVELSQLQLNFNFNWGTGEFNRGPGRFSRGPGQV

SEQ ID NO: 80655 - protein, 194 aa, Zea mays
  Coding DNA Sequence Number=SeqID_38876
MAVAVCMDTVVADAVKQSTTWISGGRGWSGRGYRWVHGEWRGCEISRALRGNCKLHINGGVAEAAWGRMSWGGDRRSNEMGREAAGRSRRAEAWRRRCGEGGAGRRHGEGGFKVVDLRRALLKIHTPKRYEQVFHGRGRFNRLGKADSQYASQTSRLQTPIEPAWTPVELAWTPVEVEVQLELRKLNIAEVQLS

SEQ ID NO: 80656 - protein, 507 aa, Zea mays
  Coding DNA Sequence Number=SeqID_38877
  Homolog annotation: Hit_ID=Q8SA98; Match level="QueryCoverage=15%, HitCoverage=38%, E-value=2e-34, Identity=100%"; Hit description =Glycyl-tRNA synthetase
  Pfam annotation: Domain name=HGTP_anticodon; Domain location=425-507; Score=37.8; E_value=3.7e-08; Accession=PF03129.10; Description =Anticodon binding domain
  Pfam annotation: Domain name=OTCace_N; Domain location=356-489; Score= 15.0; E_value=1.5e-09; Accession=PF02729.11; Description =Aspartateornithine carbamoyltransferase, carbamoyl-P binding domain
  Pfam module annotation: Pfam domain module=HGTP_anticodon::OTCace_N; Domain location=425-507::356-489
  Subcellular localization annotation: CTP_CleavageSite=56; ConfidenceScore=5.02e-01
MAWFHRDNCGARVWIRGWSPRLDPAGEGGAPSSSPAVLSSSSPAERLLRVRHSSLRLATETPSPPQLAQPFRVDVVPRRHRLHSACFAASRARDTFPHPLPDLLRPLCAQDAPPPPSQSSSLPPSSVSGLSHSMAWIWMVLVAAVVLLCRVVLCGPERAVHAPHSSDRRSRNMLLIVPHPDDKSITPEVLQRVTTTEILQGNDSLGLKYAAAAECATGEGSSEDDGDAAWKAAIDSIVSVGFSVPSSNGMVKAASSGNDEVNNHVDLEEPRERKLKGPGLSCIRPLVAAATSGSNVKVVISLGAPWSVPIRPPGLLSLDPSSLQQRLALAIPDNIRIHWPYVTVSEQFLAAKQAPKDFLQIIDFDKDTIMKVLNRAIEVKALIKSGDKSFQPFKGKTMVMIFAKPSMRTRVSFETGFFLLGGHAIYLGPDNQEFDAAAKEITKALTTVGISHIIDTTAISIGRRYGRTDEIGVPFVVAMDSTNVTIRERDDKEQIRVDINEVASVVK

SEQ ID NO: 80657 - protein, 132 aa, Zea mays
  Coding DNA Sequence Number=SeqID_38878
  Gene Ontology: Mol. function=aminoacyl-tRNA ligase activity; Cellular component=mitochondrion; Biological process=glycyl-tRNA aminoacylation
  Homolog annotation: Hit_ID=Q8SA98; Match level="QueryCoverage=61%, HitCoverage=41%, E-value=9e-36, Identity=95%"; Hit description =Glycyl-tRNA synthetase
  Pfam annotation: Domain name=HGTP_anticodon; Domain location=47-132; Score=36.9; E_value=7e-08; Accession=PF03129.10; Description =Anticodon binding domain
  Subcellular localization annotation: CTP_CleavageSite=62; ConfidenceScore=5.43e-01
MQEVMVRNSVEATTSLTSTKQGRHMRTGLFNVSTVTPFPRQFCVIFDSTFVTCCRNQEFDAAAKEITKALTTVGISHIIDTTAISIGRRYGRTDEIGVPFVVAMDSTNVTIRERDDKEQIRVDINEVASVVK

SEQ ID NO: 80658 - protein, 357 aa, Zea mays
  Coding DNA Sequence Number=SeqID_38879
MGRGKPGCDLGPALSFKDVHHPCWGGERGGPGLYLPRGPAGRLFFQLLVEATILQLCGGGVLQPCRGRRTVAAQLGCNIPPSSSLSWRGWERRPAGALWSGPLFGFDGWFASLERERKREPSGGRVCPGTMAAAAEVAGESPGTRRPADSPVGCLNRFTKRELPRAKVAIEHGRRQSWLEKEDLIDRSLAGSSVSGTDAGIDLPGPWVGLMSSEDSWPRPRGDQPSRLLGPDSRRRPWRQWPGRGDDVVLQRGDPQTRSPSEARSDLAEVEKARRTALAEELSSVKTCSVRGITYPNVSYLSQKVMSEDPLSKWSKSTKDILAERIFFRGKNSAQRGFPLLAPEGGSGFAEARLTLP

SEQ ID NO: 80659 - protein, 294 aa, Zea mays
  Coding DNA Sequence Number=SeqID_38880
MGRGKPGCDLGPALSFKDVHHPCWGGERGGPGLYLPRGPAGRLFFQLLVEATILQLCGGGVLQPCRGRRTVAAQLGCNIPPSSSLSWRGWERRPAGALWSGPLFGFDGWFASLERERKREPSGGRVCPGTMAAAAEVAGESPGTRRPADSPVGCLNRFTKRELPRAKVAIEHGRRQSWLEKEDLIDRSLAGSSVSGTDAGIDLPGPWVGLMSSEDSWPRPRGDQPSRLLGPDSRRRPWRQWPGRGDDVVLQRGDPQTRSPSEARSDLAEGVADAEGAAAPFNRQDPSLQDRIIL

SEQ ID NO: 80660 - protein, 77 aa, Zea mays
  Coding DNA Sequence Number=SeqID_38881
MPRRARTSPPHDRTDPTAADVRNPSAAKTPTTTLIPCCCVEKVVDLVVKNQDLFRSVEESQVFNKQGKWTSPSAYSI

SEQ ID NO: 80661 - protein, 56 aa, Zea mays
  Coding DNA Sequence Number=SeqID_38882
MVLAPWVRYLSQEYVPMLTWAANTYRSPSCPYFRVCTGRSPLALLIENLRLFHGSE

SEQ ID NO: 80662 - protein, 248 aa, Zea mays
  Coding DNA Sequence Number=SeqID_38883
  Homolog annotation: Hit_ID=Q109R5; Match level="QueryCoverage=65%, HitCoverage=18%, E-value=4e-07, Identity=31%"; Hit description=Ulp1 protease family, C-terminal catalytic domain containing protein
MDIVVEKGNVDVGNTAEPSYEVVARSGCSAQLSTNDTDEHELESEDSKVSVGNAAKQSHDVVGVGIDCIFNHVKVSTEADLGPQPDVIHLTSLDVPNESSQISSDADMVKQNQQDALDTLIRISQHKKPKKLNVARVVSEDYKCTPEDVQLIEFIKTLPGKQVVVNIDSAWLNRNDMECLFHGDMQLSDKALNAYIHCIRGEEHLLHREGGKVFLENTFISSLLKRDGDPKVFLSNEYRKIFTGTWQF

SEQ ID NO: 80663 - protein, 254 aa, Zea mays
  Coding DNA Sequence Number=SeqID_38884
  Gene Ontology: Mol. function=cysteine-type peptidase activity; Biological process=proteolysis
  Homolog annotation: Hit_ID=Q109R5; Match level="QueryCoverage=66%, HitCoverage=18%, E-value=7e-11, Identity=26%"; Hit description=Ulp1 protease family, C-terminal catalytic domain containing protein
MDIVVEKGNVDVGNTAEPSYEVVARSGCSAQLSTNDTDEHELESEDSKVSVGNAAKQSHDVVGVGIDCIFNHVKVSTEADLGPQPDVIHLTSLDVPNESSQISSDADMVKQNQQDALDTLIRISQHKKPKKLNVARVVSEDYKCTPEDVQLIEYIKTLPGKQVVLNIDSAWLNRNDMECLFHGDMQLSDNALNAYIHCIKGEEHLLHREGGKVFLENTFISSLLKRDGDPKVFLPMNIEDFHWYLAVLNAKKSE

SEQ ID NO: 80664 - protein, 464 aa, Zea mays
  Coding DNA Sequence Number=SeqID_38885
  Gene Ontology: Mol. function=cysteine-type peptidase activity; Biological process=proteolysis
  Homolog annotation: Hit_ID=Q109R5; Match level="QueryCoverage=80%, HitCoverage=41%, E-value=2e-48, Identity=30%"; Hit description=Ulp1 protease family, C-terminal catalytic domain containing protein
MDIVVEKGNVDVGNTAEPSYEVVARSGCSAQLSTNDTDEHELESEDSKVSVGNAAKQSHDVVGVGIDCIFNHVKVSTEADLGPQPDVIHLTSLDVPNESSQISSDADMVKQNQQDALDTLIRISQHKKPKKLNVARVVSEDYKCTPEDVQLIEYIKTLPGKQVVLNIDSAWLNRNDMECLFHGDMQLSDNALNAYIHCIKGEEHLLHREGGKVFLENTFISSLLKRDGDPKVFLPMNIEDFHWYLAVLNAKKSELKGLERQIKLAAKHKELYQGKWSNLDVASWPVIEKITTQMQTDGVSCGLWMINYMEYWTGSSLSDNVTQDDITMFMFKLPAILWDSRLNTKKGHQNLDHNVDEDGESSSDVQIIDTPLTSTNAQELMFVLCTYIMGIDNDKYLKKHWIQSTKPYPISLSLQKLKDILDVNKPMDTDCFNMAVRMIACNDSLFLLEDKYHYMDLQFLCEFK

SEQ ID NO: 80665 - protein, 129 aa, Zea mays
  Coding DNA Sequence Number=SeqID_38886
MGQSPEYEVYFRKTYPTKLQVSDQVFITAKDEKSITGNFAVRSHHASNENIFLQKDPSGSISLHDEVPDGAPNRGASSGELDRPYDATAGAPKLQGPNQMPTAPFPPINFARGGLSSSVHGDSAGDQVN

SEQ ID NO: 80666 - protein, 78 aa, Zea mays
  Coding DNA Sequence Number=SeqID_38887
MVGSYCKVPCDALFILGNINNPKDGSLMIEDPLTGHMPRHGKRQIFIAFAPRWYLMKKNKNEDTGGLGPPHRIFLFDS

SEQ ID NO: 80667 - protein, 135 aa, Zea mays
  Coding DNA Sequence Number=SeqID_38888
MSSYCSKGYPDSGYRQWPPGPPQGRIRACPRVRDWAVGFGGGEEAHYRRRWRASSRLSSPAPHIETGAPAAGGAWPLASTRGGRMITSLVKVDSGLSHGSNPRGYEIDGSGYDYGAGEDEAVEGDFQEFQDYDEF

SEQ ID NO: 80668 - protein, 130 aa, Zea mays
  Coding DNA Sequence Number=SeqID_38889
  Homolog annotation: Hit_ID=Q9LTT4; Match level="QueryCoverage=54%, HitCoverage=16%, E-value=2e-21, Identity=65%"; Hit description=WD domain protein-like
MAWSLAVVWCFCLQAVDTFSGIRGSMSNYYDDYDDIDGMEDDYDMDDPIDDMVDEQQGIRDSDVEDNDYGQPNDKIPDTSSADARKGRDIQGIPWEQINITRKKYRQSRLEQYKNYENVPNSGEEAMKVS

SEQ ID NO: 80669 - protein, 115 aa, Zea mays
  Coding DNA Sequence Number=SeqID_38890
MNLEEMEPELRPYYERKKKELRDGGASGSRTVTATLGLGDSALGLGDGDARARGRGRWRTRRSGSGTAALGLGDGDGGARARARGRGHDGTLAAQLCQLGREELGFPPTNKPFIL

SEQ ID NO: 80670 - protein, 92 aa, Zea mays
  Coding DNA Sequence Number=SeqID_38891
MNLEEMEPELRPYYERKKKELGDGGASGSGTVTAALGLGDSALGLGDGGARARGRGRRRLGLGSPAHSALGLGDGEFPLLGDGDTTAAWRRN

SEQ ID NO: 80671 - protein, 92 aa, Zea mays
  Coding DNA Sequence Number=SeqID_38892
MGKQERRNSGCRPWEMTKKSGRHCWAWQPREMRRQRGASASMGKKWASSRAAALEREGARRPGSSCAGCCCRGRTPARGRRQGEKKVAAREK

SEQ ID NO: 80672 - protein, 120 aa, Zea mays
  Coding DNA Sequence Number=SeqID_38893
MSATRRTSQLRYFIHGRDRVGEKQGEMQGGASPMGLFPAAAMGKQERRNSGCRPWEMTKKIWAPLLGLAAKGDDKAERGFGFHGEEVGELTCCCIGEGGSSAARELLRWLLLLWEDSCAR

SEQ ID NO: 80673 - protein, 142 aa, Zea mays
  Coding DNA Sequence Number=SeqID_38894
  Subcellular localization annotation: CTP_CleavageSite=27; ConfidenceScore=5.37e-01
MGSSGSYSTKYLIAQKSPWGNPKSNPRSFPYWNRTRGGENGGRAYRRRDSSGKVVDDVGEVAAVTSVCRSSSRMAGVGRPSWAGGEARRRRGFQPNHSDIAQSSELGSFKGGQGGRGCKESKNGSPGGPVYEWWRAAEVRRW

SEQ ID NO: 80674 - protein, 96 aa, Zea mays
  Coding DNA Sequence Number=SeqID_38895
  Subcellular localization annotation: CTP_CleavageSite=71; ConfidenceScore=5.13e-01
MKILGLTSSELYAARQSHPNASHRGQPFPETPSLTRAFGQFPRGAVKVLQARIETLPHRSSGITIAGLLSPATARRPGHQVNHSSIPCTHDLPDLP

SEQ ID NO: 80675 - protein, 121 aa, Zea mays
  Coding DNA Sequence Number=SeqID_38896
  Homolog annotation: Hit_ID=O82261; Match level="QueryCoverage=45%, HitCoverage=9%, E-value=2e-14, Identity=65%"; Hit description =Protease Do-like 2, chloroplast precursor
ASCFSPQQARTFVLERHRRSVKVDRRGDDKKYLGKVLARGVECDLALLSVENEEFWRGTEALHFGRLPCLQDDDDTDIIGCCTLKVDNVTCKDSIRYFNIVEIEELVYKAIKGFCAGISLI

SEQ ID NO: 80676 - protein, 244 aa, Zea mays
  Coding DNA Sequence Number=SeqID_38897
  Gene Ontology: Mol. function=serine-type endopeptidase activity; Cellular component=chloroplast thylakoid membrane; Biological process=proteolysis
  Homolog annotation: Hit_ID=O82261; Match level="QueryCoverage=96%, HitCoverage=35%, E-value=1e-100, Identity=77%"; Hit description =Protease Do-like 2, chloroplast precursor
  Pfam annotation: Domain name=Trypsin; Domain location=1-146; Score= -47.1; E_value=0.045; Accession=PF00089.16; Description=Trypsin
VLARGVECDLALLSVENEEFWRGTEALHFGRLPCLQDSVTVVGYPLGGDTISVTKGVVSRIEVTPYAHGTSDLLGIQIDAAINPGNSGGPAFNDQGECIGVAFQNHMRSFFIVFEGAFMLLIRVYRSDEAENIGYVIPTTVVSHFLNDYQKNGKYTGFPCLGVLLQKLENPALRESLKVPSSEGVLVRRVEPTAPASSVLRKGDVIVSFDGIAVGCEATVPFRSTERIAFRYLTSQKRVNCCIA

SEQ ID NO: 80677 - protein, 49 aa, Zea mays
  Coding DNA Sequence Number=SeqID_38898
MRLEFRLGKLEVDHMKTVDIDTNDRDKGDPSDCKRSVKVFKSGDQPDIV

SEQ ID NO: 80678 - protein, 520 aa, Zea mays
  Coding DNA Sequence Number=SeqID_38899
  Gene Ontology: Mol. function=hydrolase activity
  Homolog annotation: Hit_ID=Q69MT1; Match level="QueryCoverage=99%, HitCoverage=87%, E-value=1e-117, Identity=70%"; Hit description=Acyl- CoA thioester hydrolase-like
MDSPIKVVSHLGGGRGGGGGEGEGEGEGGAAAIDAGKSARRPLSLWPGMYHSPVTNALWEARSSIFERMMDAGNGASSAEQRPQTELLVKTPAQSRTSIVYKFATDDILREQYRDPWNEVRIGKLLEDLDALAGTIAVKVEHMDEVLHTEVEHMEHKEVLHTEVEHMEEGRMEVSGKKLDFRPQQWGRGIPDVPGMRLEFRLGKLEVDHMKTVDIDTNDRDKGMVVNAQTGNSARGSEAETSERRCSEEDSSNGRVVGDPSDCKRSVKIEVTQVDKGIIGSVEADGDNQSDPIALTANFTFVARDSKTGKSAPVNRLSPETEREKQLFGESEARDKMRKRKREEQKGGLENGIHRLRAEAERLDVLLAEGRVFSDLPALADRDSILLKDTRLENSLVCQPQQRNLHGRIFGGFLMHRAFELAFSTAYAFVGQRPCFLEVDHVDFLKPLDNPEQPLVNVEVVAHVTRPELRKSEVSNTFHFTFTVCSDTLKNGLKIRNVVPSTEEEARRILERMEAEGLCN

SEQ ID NO: 80679 - protein, 79 aa, Zea mays
  Coding DNA Sequence Number=SeqID_38900
MDELEEVLSRGNSRLGKQWPRKSAMGGNWASRLEMELGRTAAMGREYGRARPEQRDERTGALAASRGGRGGPGKSSRRA

SEQ ID NO: 80680 - protein, 83 aa, Zea mays
  Coding DNA Sequence Number=SeqID_38901
MKCYERDAKASRTRTGQSRARELGTAARELGRPAEESAQGAAGGAEKKLSAARKREQADRGPSRGSLGQAKGAVATGCRRTNL

SEQ ID NO: 80681 - protein, 202 aa, Zea mays
  Coding DNA Sequence Number=SeqID_38902
  Subcellular localization annotation: CTP_CleavageSite=34; ConfidenceScore=5.06e-01
MSTASSFARTTTRRRRTEQGASRQHAQEQRNATRAMQRRAGRGLGRVEPGSFDEREGAQAGSTARLEKQEMRQRKHQRRDYEGDGGAAERGDIGRGELEGAQNAELSARADREQSRGAAGAESKRGKKRGGERGSTAWRRRGRARTGFLRQGKTMGVSREEAAAMGEQQQGKQRSGASSARRVRRSSTAWCREDSRARRAGS

SEQ ID NO: 80682 - protein, 326 aa, Zea mays
  Coding DNA Sequence Number=SeqID_38903
  Subcellular localization annotation: CTP_CleavageSite=82; ConfidenceScore=5.38e-01
RQTETGTRQHGLDPANSDAKSKARLQPGGLGYKHTQRITVSSARVTDSMSTASSFARTTTRRRRTEQGASRQHAQEQRNATRAMQRRAGRGLGRVEPGSFDEREGAQAGSTARLEKQEMRQRKHQRRDYEGDGGAAERGDIGRGELEGAQNAELSARADREQSRGAAGAESKRGKKRGGERGSTAWRRRGRARTGFLRQGKTMGVSREEAAAMGEQQQGKQRALGDGAEKDCAQQGDEYRPIGRWGTRGWGSSGPRKSAMGGNWASRLEMELGRTAAMGREYGRARPEQRDERTGALAASRGGRGGQGRAAGARRGGTQGERSRVR

SEQ ID NO: 80683 - protein, 294 aa, Zea mays
  Coding DNA Sequence Number=SeqID_38904
MGRGKSGCDLDPALSVGGVRHPRWGGERGEPGLYLLRGSAGHLFFQLLEVAIALQLCGGDVLQPCRGRRTVAAQLGCNITLSSSHSRRGRQRGPAGALGSGPLFGFNSWFASLEREREREPSGGRVHPGPWLLLQRSLAGLPVFVAPQARGCSYPRGRNRSSVCNGTLNANSHVGYLNRFTKRESPRVKVTSEARGSDISINRGRVGSKMKPGWLEPNRVIRWRDRRWGRPADASGRAGALGGRLVEAPERPTEPPARAGLPEKTLAVAEPPKLLGPHAPVLVSKTAMHVHQIT

SEQ ID NO: 80684 - protein, 265 aa, Zea mays
  Coding DNA Sequence Number=SeqID_38905
  Subcellular localization annotation: CTP_CleavageSite=8; ConfidenceScore=5.06e-01
MSSRSLMRCVFPPSKPPDGGYPPFFRLIVGGTQLRGSWYLSAIVWLQGFSSHSPVAPLRWWSPKTVTSSSWMGRGKSGCDLDPALSVGGVRHPRWGGERGEPGLYLLRGSAGHLFFQLLEVAIALQLCGGDVLQPCRGRRTVAAQLGCNITLSSSHSRRGRQRGPAGALGSGPLFGFNSWFASLEREREREPSRRPRPPGTMTAAAEVAGGSPGCSSPRRLEAAHTRGDGTGSSVCNGTLNANSHVGYLNRFTKRESPRVKVTSE

SEQ ID NO: 80685 - protein, 99 aa, Zea mays
  Coding DNA Sequence Number=SeqID_38906
MSTCFADSPSPGPRKNDLTIYWALGPFVRSFTLPVDPRDICPPQAPDLWVDFEAISPKIPGPACRYSLHALHGCDSFEKYTDNSWASPQWVWARDGLVR

SEQ ID NO: 80686 - protein, 152 aa, Zea mays
  Coding DNA Sequence Number=SeqID_38907
MVCARCTRNNGQCLQVRAAWKCITPYVLASIHCMPCTDVTVLKNILIIPGRPPQWVWTRDGLTYIRAIERSGLEGSDESEYSSDEEDSSEGGGGDGDDDDDDDDGGGGGNDGDGGDDGDSGGRGGNGGSKDGDGGSSRGSNRGGRGSNRASG

SEQ ID NO: 80687 - protein, 603 aa, Zea mays
  Coding DNA Sequence Number=SeqID_38908
MSSSSSSSDTTPPAAASSEETLSSVMVEELRAGDSVDFGVSRMTSARVEDMQRLGYFGGGVARAPGTEEVPEPEVMDKDRQGAAQKRQAAVRIHEARPKRPRGTAKAVASGGGKPPLAAKAGASAPSKAPEATAGAGGSKSAKVVPPASGVAKASKAARALPLAGKRVADFGTDITVDDYLGGSDEGQLAIVAPAAAIATAAQAPKARGEILGAGGEVPALTLVRDEAGAATRRLKGVTEALSQATEALSQVADFTSRTASGALTAALSAEVERLRTQHADAVREKSASDSKCRNLTDKVAALEREKVDLRRQLAAERREANEAIAKEQAAQADAKLARAEGNLAKELVEQLQGRLTALESRAKEAEAVMRAEAERTRTQLMDTYRELGARTGDFEVPDREPGLRCLQWAQEELLELPTVVGGLMSYASLITCEGAMNALSREGCRHFEAFDQVDEDFERDIYKVEDPVVKESAGALYDRMWGLYGREVVSERAEAARAQAQRGERVDDFGALDSVLPDLGSTLAEAVTGVDLEPIPETAAIATAAPPSAATGEGDPDASAAAVPSAEGSAAVAAETAAEAAAEPLAEPTAGAPAAPGPSQVA

SEQ ID NO: 80688 - protein, 46 aa, Zea mays
  Coding DNA Sequence Number=SeqID_38909
MRLHTLRDDVVLYPQRYEDRGPTHCIPMHTLSDICRCLLLIKGSGK

SEQ ID NO: 80689 - protein, 60 aa, Zea mays
  Coding DNA Sequence Number=SeqID_38910
MKSYLSFVVTYGPTVPVQLSIMMWFYTLRGMKIEDLHIAFLCIHRSDICRCLLLIKGSGK

SEQ ID NO: 80690 - protein, 46 aa, Zea mays
  Coding DNA Sequence Number=SeqID_38911
MRLHTLRDDVVLYPQMYEDRGPIHCILVHTLSDICRCLLLIKGSGK

SEQ ID NO: 80691 - protein, 46 aa, Zea mays
  Coding DNA Sequence Number=SeqID_38912
MWLHTLRDDVVLYSQRYKDRGPTHCIPMHTLSDIWRCLLLIKGSGK

SEQ ID NO: 80692 - protein, 161 aa, Zea mays
  Coding DNA Sequence Number=SeqID_38913
MVGKVQIKDKETNVLCLSAGNRKNRIGIVLARAAKTLLSLGAPDSVRITVYMLGENLLESLFVLSFNHQNPQLGLIALTVLCAAFVQLGVESRMRNAERRTAAGIADARSRSSSMDMASGFEQGKQLTTIFQSTRIQSKYPTPVEMNGTGPLGTGEKIEMD

SEQ ID NO: 80693 - protein, 104 aa, Zea mays
  Coding DNA Sequence Number=SeqID_38914
MPKCEMVDKVQIKDKETNILCLSAGNRKNRIGIVLARAAKTLLSLGAPDCPVVHQTVSVRQAGSSELAALGNSPATYGYNSPDCPNFKCKGERLQVVEIPRKRD

SEQ ID NO: 80694 - protein, 191 aa, Zea mays
  Coding DNA Sequence Number=SeqID_38915
  Homolog annotation: Hit_ID=O40947; Match level="QueryCoverage=79%, HitCoverage=20%, E-value=7e-13, Identity=24%"; Hit description=ORF 73
MNVCELTLAVSHPPIGQEQLEERTKAASHQFASERSELEQEREDYKEDLQKVFYQEREVTQKEKKLAKKDEHLDQREEVITALSEKLKAYNVMLEKQWDEQTAAEASLQKLQRELDERASNIALAEENLKAKDASLEKQVTDLAWQEKDLAFSEEMWERRDKLLADHELEVEEEKRLEEKERTLEERVRRF

SEQ ID NO: 80695 - protein, 174 aa, Zea mays
  Coding DNA Sequence Number=SeqID_38916
  Homolog annotation: Hit_ID=UPI00005BED01; Match level="QueryCoverage =84%, HitCoverage=12%, E-value=6e-10, Identity=27%"; Hit description =PREDICTED: similar to golgi autoantigen, golgin subfamily a-like
MNLEERTKAASHQFASERSELEQEREDYKEDLQKVFYQEREVTQKEKKLAKKDEHLDQREEVITALSEKLKAYNVMLEKQWDEQTAAEASLQKLQRELDERASNIALAEENLKAKDASLEKQVTDLAWQEKDLAFSEEMWERRDKLLADHELEVEEEKRLEEKERTLEERVRRF

SEQ ID NO: 80696 - protein, 125 aa, Zea mays
  Coding DNA Sequence Number=SeqID_38917
  Subcellular localization annotation: CTP_CleavageSite=51; ConfidenceScore=5.71e-01
MGRITRGPPCWTRPHGGMTSSQVFVRCRMGRRVSLPVVLSPLDQRLRRRPRAKGGVFAFAPTVTRSTCSGGVTNSGERDRTVPVGLVLSSSLGKLHGLSRKLSEGSDRAEVGESGLATVGTLGRL

SEQ ID NO: 80697 - protein, 122 aa, Zea mays
  Coding DNA Sequence Number=SeqID_38918
  Subcellular localization annotation: CTP_CleavageSite=39; ConfidenceScore=5.14e-01
MLEPRTSPTGTVRSRSPECVTPPQHVDQVPPTTSVACARGQSSSSHLRRRPAHRRDCRDLPDVTDHPTGALLPPIATFADGEYVIIPEQGVDREGVQEPAPEPATEDLPAAPALEGKPRFYA

SEQ ID NO: 80698 - protein, 303 aa, Zea mays
  Coding DNA Sequence Number=SeqID_38919
MTHSSGREAAPRMNGRGVRKRSWRDPLWPGGLGAAWNRPVISGVGGLSDEGGDDLEEVRECADERGVNLPWITAIGACGLCDGLADVVGVGTAGGHTEGTFVGREWQVRTSEKESEEEDVSTGCWEAEEEGPRSAGHVEDLGLNDSITELKDDPIQKKLIEKAEKEEKQKNVEENNVFLTYVKYFENFHLDDVEANGLCGFEYIISGNKEIYGCFADGQMASQDHIDFYAICLDYNDKLFRMKAHGYRIFLPTALPLWCLFPSCIGHTEWYIASTWFISKSTFEILINGSSIQTKINSTLDFA

SEQ ID NO: 80699 - protein, 176 aa, Zea mays
  Coding DNA Sequence Number=SeqID_38920
MPIQTLAAAECQASENTRSSPPSSLRRPTPEIAGWFCAAPRPPGHSGSRQDRFLTPLPEGDNDCVEEASGVRMVRARGWTVRDLEQGSGFQPDGPDGPSVCMGGKDQRLGHPLPPAQPAPAPPPSDPAITGDQPQPHHKVGDKEADVAIIETDGSKAGSSSSHSSRLLWELGIHVS

SEQ ID NO: 80700 - protein, 308 aa, Zea mays
  Coding DNA Sequence Number=SeqID_38921
MGGTRVAFVLLLLEERDFVGVGAFSHRSASRIFIMQPGCIPSPMVIQDDDHQFSGGEKQAGLQPLPRPQLQGSSSSTLGRRARRVGAYLRVGRVQLSVLHPKRRLCHVRADHVQVLPALSAAQHVVRREGGTRVLGQSRSRSRGKNGSEDLPVRFGAAAARWCGVSGQVAAVVGAEVVVAIGEAASAEAVAPVDETVSATCAPGLRLFGFNGWFSSPVRGRERGPSSGSVCPGAIAAAVLSSETEVAAALLVQRSPASHPEFVVPQALWCGGCSYPREWNRSSVCNGTLSMSVCSLWLSRPEHLGIWA

SEQ ID NO: 80701 - protein, 339 aa, Zea mays
  Coding DNA Sequence Number=SeqID_38922
MGGTRVAFVLLLLEERDFVGVGAFSHRSASRIFIMQPGCIPSPMVIQDDDHQFSGGEKQAGLQPLPRPQLQGSSSSTLGRRARRVGAYLRVGRVQLSVLHPKRRLCHVRADHVQVLPALSAAQHVVRREGGTRVLGQSRSRSRGKNGSEDLPVRFGAAAARWCGVSGQVAAVVGAEVVVAIGEAASAEAVAPVDETVSATCAPGLRLFGFNGWFSSPVRGRERGPSSGSVCPGAIAAAVLSSETEVAAALLVQRSPASHPEFVVPQALWCGGCSYPREWNRSSVCNGTLSMSVCSLWLSRPEHLEASSARKEASSAREHVASLAEDVQRRRLELGQVVR

SEQ ID NO: 80702 - protein, 337 aa, Zea mays
  Coding DNA Sequence Number=SeqID_38923
  Homolog annotation: Hit_ID=Q6QP51; Match level="QueryCoverage=19%, HitCoverage=38%, E-value=3e-28, Identity=79%"; Hit description =Putative growth-regulating factor 1
MTIGEGMQPGCMMKILEAKRWLKGANPREVALLQQQQDEGNAGGSPHSHPQVSRAKSSPTCSRVLPLRHGGWVPHVMQADPKQKKPNHRTRSMQPPGGYKHSSILVETHGRKGELPCRWHTTAPRWRTPLASSHPAWWPRPTRHVTGAPVTTCKKSHRHLRQCRAFSTTELVPRLKAALRMTQQRQSSTMIKGQSAAGGGATVNMAKSGPAIMAAADERKQRSNRLASDTFGRRSGRRFTSAMMTASKRDRERGYFERDPSLRRKRAPSPPTDKGFEGWPLGRVRQPPESTRAPRPLLIRGSKAGPSEGFDSRPRARRVRDDSGYVRYMAEARATLP

SEQ ID NO: 80703 - protein, 196 aa, Zea mays
  Coding DNA Sequence Number=SeqID_38924
  Homolog annotation: Hit_ID=Q6QP51; Match level="QueryCoverage=90%, HitCoverage=98%, E-value=1e-51, Identity=59%"; Hit description =Putative growth-regulating factor 1
  Subcellular localization annotation: CTP_CleavageSite=16; ConfidenceScore=5.05e-01
MASDTFYRRSGRRFASAMTTASNKGFEGWPLGRVRQPPQSTQAPCPLLIKGSKAGPSEGFDNRPRARRVRDDSGYVCYMAEARATLPSHFALPLTDLTGKQRRSPHSDCCASHPGKADNSKFSLGRDRMLRLAQPWASALGGGLRLTRPQDSSSASVSGGITSSPDPGLGLRRSLRLARPWARTDRATGDTSLPYP

SEQ ID NO: 80704 - protein, 101 aa, Zea mays
  Coding DNA Sequence Number=SeqID_38925
MSTVEKGEVGAQLLVANLHAGRAGKGRAGRGRAGPACRGIGTGEARPRPGCTEGAVRARLRRREQVDRGERAQAAAALPDAREGRGKGAQLCAAWAVAAGS

SEQ ID NO: 80705 - protein, 133 aa, Zea mays
  Coding DNA Sequence Number=SeqID_38926
MAARREAQTALDSCTGIGSHRGQGVALVGDLAGHWQSCIRHGFGHGWLGSTKEKKQGRARSREGLRAAMEAERDRDEDDCSRASRCRRSRRARWARDFWWLTSMPVEQGRAGLDEGERGLHAEAQGQGRLDRA

SEQ ID NO: 80706 - protein, 126 aa, Zea mays
  Coding DNA Sequence Number=SeqID_38927
MTKVTACRRWSIEFTGGYKGCTFIIIMYINGSETRQGKPQMDIQWSMPPRGQILPPPQPGMGYWPPPPWGYPTHPMGPWGCPPWPTQPLPSPADSGSHQVTPPPHVDFADRCLNSSGGATNNNLMS

SEQ ID NO: 80707 - protein, 111 aa, Zea mays
  Coding DNA Sequence Number=SeqID_38928
  Homolog annotation: Hit_ID=Q6Z4F3; Match level="QueryCoverage=40%, HitCoverage=11%, E-value=1e-15, Identity=88%"; Hit description =Transducin / WD-40 repeat protein-like
MAELGSRARQINQLDSILAAVPWTLAFGFLNCTLLFKLIFDEFTVRIIPRDAPLLESVGPQKCLAFSTDGAKFAIGGEDSGSHQVTPPPHVDFADRCLNSSGGATNNNLMS

SEQ ID NO: 80708 - protein, 228 aa, Zea mays
  Coding DNA Sequence Number=SeqID_38929
  Subcellular localization annotation: CTP_CleavageSite=40; ConfidenceScore=5.20e-01
MSRRFFDTPSIYTHEHPTATTTTEKFQSAPQFFQRRRSPAATTVLPSEQFQPNKRLELGHKFHRLGRPLGLCVGIKLLDGTRLSFFFSKFPQKITNKKQVQICGAWYLVPTYIDKIVRFLLPPSDTNLGRVATVERRPREEQAGGIKTVSKGGVVASVMSIKLDVLDTLYAGMEEPGLVTGVDLGHGEANLWGLKHDVLDALCAGTKEPSLVVSVGLEQTWRHHCRIA

SEQ ID NO: 80709 - protein, 130 aa, Zea mays
  Coding DNA Sequence Number=SeqID_38930
  Gene Ontology: Mol. function=hydrolase activity; Biological process =aromatic compound metabolic process
  Homolog annotation: Hit_ID=Q8H5Y0; Match level="QueryCoverage=51%, HitCoverage=22%, E-value=1e-10, Identity=56%"; Hit description =Hydrolase-like protein
MVERRRDVRAVGSRLSSSWRRRHCAGATMRAAAFDLVPRDRGEPEMRGGVLRSQHPGAPARLRPLGDAAVVAPGLLKTDADDQAWLLRAGAERVEDIMLLCFPEQLWWLLQLAYHRPHHFTPGFMLCDLV

SEQ ID NO: 80710 - protein, 131 aa, Zea mays
  Coding DNA Sequence Number=SeqID_38931
MSQLMGLVEATKITLDNREDLVVDLSTELVEKDLQVEQMATQIQELEEQGGARENTIEVLEDQLLNTQQQHEEANQHLDMHQQEIQDMEAEGADEDVDIEGGEEPEPASSLDTAGSGRPPSPESSVVSFAH

SEQ ID NO: 80711 - protein, 91 aa, Zea mays
  Coding DNA Sequence Number=SeqID_38932
  Gene Ontology: Mol. function=metal ion binding; Biological process =metal ion transport
  Homolog annotation: Hit_ID=Q75LM5; Match level="QueryCoverage=90%, HitCoverage=32%, E-value=2e-12, Identity=62%"; Hit description =Expressed protein
MPTIIVSVDLECSRCRAKIEKVLNRIQEKGEFCIDDIDFGREEQQGEGDGAPSTRTSSPTSCACKAWQDHSSKSRFVGAVRLALLKTLTKE

SEQ ID NO: 80712 - protein, 368 aa, Zea mays
  Coding DNA Sequence Number=SeqID_38933
  Homolog annotation: Hit_ID=Q75LM5; Match level="QueryCoverage=12%, HitCoverage=19%, E-value=1e-09, Identity=68%"; Hit description =Expressed protein
AAKEEAQPPGLDPRTRRSAVTRATGDMDGGGRGEEWEGPPGYVLSLPAAALPLPVAVSCLDATVRRKGRSHIRHRGHPSGWWAFSLPVPAPEEAKGPVPPSSTANNPTEEGRSYPRWRIVWRKQVPLLHRATLKTSTASDFPRSTPPSGCFPSGVAISSTARSTLLSKEGRGFALPRDPLPHRAAFLPRSRTPPMRDPRCSPWKAGDLLYPDVEISSSAIQASSNTRGKNLAVSRDQGAVQMSTIIVSVDLECSRCRAKIEKVLNRIQEKGEFCIDDIDLDEKSNKVKVTTLLLVGPRGSGKSTLVNRITRVFDKDDDPFAPDRAQLQNIKSEIADVSANPQASRVDHDALISVVEPLLSDLPCVKTS

SEQ ID NO: 80713 - protein, 147 aa, Zea mays
  Coding DNA Sequence Number=SeqID_38934
MVVMHCTALEYLIDGVRPPTSFWRGRRPAKMLLHCSCSCSDADAPTEPAHVGPDPDPDPDRGRACTPPRFLAVPNDPKSPTRNGTVNPLRHSNDQPEPPPPPPTGTGTGKPPPPPPAILTAARARWSSTSARDSTRLDCSFRLDLQA

SEQ ID NO: 80714 - protein, 333 aa, Zea mays
  Coding DNA Sequence Number=SeqID_38935
  Gene Ontology: Biological process=lipid metabolic process
  Pfam annotation: Domain name=SapB_1; Domain location=175-214; Score =21.7; E_value=0.0026; Accession=PF05184.5; Description=Saposin-like type B, region 1
  Pfam annotation: Domain name=SapB_1; Domain location=237-275; Score =27.3; E_value=5.5e-05; Accession=PF05184.5; Description=Saposin-like type B, region 1
  Pfam annotation: Domain name=SapB_2; Domain location=278-312; Score =29.6; E_value=1.1e-05; Accession=PF03489.7; Description=Saposin-like type B, region 2
  Pfam module annotation: Pfam domain module=SapB_1::SapB_1::SapB_2; Domain location=175-214::237-275::278-312
MVVMHCTALEYLIDGVRPPTSFWRGRRPAKMLLHCSCSCSDADAPTEPAHVGPDPDPDPDRGRACTPPRFLAVPNDPKSPTRNGTVNPLRHSNDQPEPPPPPPTGTGTGKPPPPPPAILTAARARWSSTSARDSTRLDCSFRLDLQAAELPDHIAITLKEQVSSTKIPVRLKSGSPLCSACENFTGKAVSYISEKQTQDKVMGFLHDACSQSFSFEQKVIILSMFWARLFFSGVTSDSTCVFCHHLLDEVMSKLKDPDAEFEIIQILIKECNKIEGHVQQCKRLVLQYIPLILVNGEKFLEKNDVCALVQACPATHKKTFSSVLKGALLLSDA

SEQ ID NO: 80715 - protein, 145 aa, Zea mays
  Coding DNA Sequence Number=SeqID_38936
MAAGSRKEVGGLICTVGAVKGAGCTAMAVSDSNKKERIGRWQWVYLRERGDRAGRRRVKDDEREVEVRVPAKCDATVVSKGGGALRLKRGCDRRRTGAKVAEVTASALVAEVTASALVGNADRGITAAGVHSPLGTGGGGWTRVE

SEQ ID NO: 80716 - protein, 102 aa, Zea mays
  Coding DNA Sequence Number=SeqID_38937
MAAGSRKEVGGLICTVGAVKGAGCMAMASRKEGALRLKRGCDGRRTGAKVAEVTASALVAEVTASALVGNADRGITAAGVHSPLGMGGDGWTRVERERRGLR

SEQ ID NO: 80717 - protein, 195 aa, Zea mays
  Coding DNA Sequence Number=SeqID_38938
MQPGCIPHQWSSKMMTTSFMVGRSKPSCGLCPALSFKDVHHPGWGGGRTESGFYLPHGLAGRLFLQHSGERALIGLAEGANFDNARPVGHKHRQLQRAWLAGSAGSVTASDAASCRLILAWPSVHRTGDCCAVRTGESSKTSYATWAAFVFLDCLVLTPTRRLRAEPPEAEVVVAADGAVAGKPPRVCYPAGPLV

SEQ ID NO: 80718 - protein, 45 aa, Zea mays
  Coding DNA Sequence Number=SeqID_38939
MPLSNGIDTGDARDSSADFAGHHQAAWRRGRAPCVDVCSRWKKDF

SEQ ID NO: 80719 - protein, 73 aa, Zea mays
  Coding DNA Sequence Number=SeqID_38940
MALSNGIDTGDARDSSSDLAGHHQAAWRRGRASCVDVCSSPWIVILRLGMESFAIKCPPLILDLVDWNAYRFN

SEQ ID NO: 80720 - protein, 280 aa, Zea mays
  Coding DNA Sequence Number=SeqID_38941
  Subcellular localization annotation: CTP_CleavageSite=81; ConfidenceScore=5.37e-01
MARDHVFLPTTDWAAAQLTSRRRTHRSSMPPPKKLDHVAMRLGNDQQSPTSYPGRPRCRSHPACITMVPESVARTKKCTARGDAEGDEDDTAAVDLLLQPGKPSGGLVQPATVPSDQELRTARALAISPDPCSATAEPPAQPFTNGRRRRPEFTRHRMILSLSRFPERSEDSQCAWMARVMRRQLLIYCPQGRPAPTVQACGSRANCPVFLAVCCREDRHRVYYARGEGADTGDPTWQRYKRRPAAAAKTSSEGWRLCLRPNICPPRDQFDKVTWCRRRR

SEQ ID NO: 80721 - protein, 546 aa, Zea mays
  Coding DNA Sequence Number=SeqID_38942
MEVVELVPCARNKWGNWHEFWFYVAEGTVEDHPGLPVSEMCSHFYSAYPPFEVAEEDADEGALRRAASLSSGRDLVEEFVAYGVWPLAHGWALGEVCPRQMPSHGGKLVRSPVFALDLQSRDPAAFVREAEDGAVRIVGRYVPRTEGQRSWDIRGSNDRLNRVFELNRLPYGGYPGQDDVDRRGKKPVVESGDDPAPAAAPSSKKRKLGTAMGGLGVSDGFARELMRTCAAPGGRMTSPELRESSARMLRVTGGWWPRNVPIPRAAGEDFFTSRMVREWKVFPYGRNIATVVSAVMDKDRQGAAQKHQAVVRLHEARPKRQRGAAKAAAPGGGQPPLAAKSAVPASSRAPEAATAAGGFKSGKAAPTSSRVPEAAKAGRGLPPPGKRVADFATDISVEDYLVGSDEGQLVVVPPAAATAATAVTAVVPKAKGGALSAGGEMPALTAVRDEAGAVSRRLKEMKEALSQAADFADRAASGALTAVVSAEVERLRTQHADAVREKSAADSSAASWRTRWPRWRGRRLTSMLGRRQDATLRSKSSLQPLV

SEQ ID NO: 80722 - protein, 164 aa, Zea mays
  Coding DNA Sequence Number=SeqID_38943
MATGYRLRAMDLYEILLLVTWLAHRAMTSSIYRIARLLILHNASCHMEWFVWLKPVSARQGILSGGVEIGIVSTVISSSKDWSRSAETCFKKKCLFLFDYFDSRTVILVRLLRFWDYQNTDRGYTVYFDSRTTKCLYCLKAVFILVYYLLDVWRNCPNYSNLSA

SEQ ID NO: 80723 - protein, 461 aa, Zea mays
  Coding DNA Sequence Number=SeqID_38944
  Homolog annotation: Hit_ID=Q6VBQ7; Match level="QueryCoverage=17%, HitCoverage=40%, E-value=9e-36, Identity=90%"; Hit description =Partner of Nob1
MASATGVSSSEMAVDHATGPGAVEKPRFDALTPNEMSGGRPQFRKVPMPQHRFAPLKRCWMEIYKPVYEHMKIDIRMNLKAILLKNFSSSQTLPIQISPLLHGAPNNQPLIMEFSVLEFDDLGISPISNLSMLDYNDYHRTIDCILQIAVKKLNPESVQGLQSGRITWRTSTLSVTIECSGLFSTPVLTTVRIGASFTIPWFYYIDHLGWAGGVEIGIVSTVISSSKDWSRSAETCFKKKCLFLFDYFDSRTVILVRLLRFWDYQNTDRGYTVYFDSRTAKCLYCLKAVFILVYYLLDVSVCLIMQVDYSAYVHNSSSLHMTASFFSLLDSFHFCPLGYKDFPDLGNTTSSLLSTCCHVVLELWYNWSWVKATWSLEVEVSDNNCVYRNEVHHTAGERTQVLQDVASDPTLPRTKTVRCNLCGHGEVVFFQQSDICISVVAIDGRGKRGGGDDPVLCVLQP

SEQ ID NO: 80724 - protein, 124 aa, Zea mays
  Coding DNA Sequence Number=SeqID_38945
MRRQMLEAALVTVDLGTWGRDLALSDGHQQWHRAAISKCEHGTYPAGDKLKLYGSGGKEGTPLVIGKGALFNATTFRYRPPRGRLRCYQEESHSAALASTSSYTVDPNWYNDTGATVHITSDLD

SEQ ID NO: 80725 - protein, 312 aa, Zea mays
  Coding DNA Sequence Number=SeqID_38946
  Pfam annotation: Domain name=IQ; Domain location=161-181; Score=28.5; E_value=2.3e-05; Accession=PF00612.17; Description=IQ calmodulin -binding motif
  Subcellular localization annotation: CTP_CleavageSite=40; ConfidenceScore=5.76e-01
MASTANFAASSWQPASPSPWTVPYVTFVTPSWQPTSPSLWAASYATFVTPSWQPASPSLWATSPVNFITTSWTPACPSPGTTPNFVTSSLTTSPSPWATPLGAATTQQSPAPSMGDLWTNIRADLAKMQATLQKVEQGLLQIKVAVQHEHHHLALSARLQTSAAVGIQAAARGFLARRRVREMRRQMLEAALVTVDLGTRGRDLALSDGHQQWHRAAISKCEHGTYPTGDKLKLYGSGSKEGTPLVIGKGALFSATTFRYRPPRGRLRWLLLRPIPGARPYAPLSSRWRPWDPGGCTRASPMRGGCPPYLMG

SEQ ID NO: 80726 - protein, 213 aa, Zea mays
  Coding DNA Sequence Number=SeqID_38947
  Pfam annotation: Domain name=Hin1; Domain location=53-189; Score =73.1; E_value=9e-19; Accession=PF07320.4; Description=Harpin-induced protein 1 (Hin1)
  Subcellular localization annotation: CTP_CleavageSite=53; ConfidenceScore=5.14e-01
MPPEAASSTGHIVARIRRPLPAERPHVRRCTRLLCSAFLTVLLVAGVVLFVVYLAVRPHRPRFHVTAFSASGIGPSSGGTVSLSGQLSIRNPNRDIAFFYDRFYLSVEYRGADVVKGQALTAAPLYQPPKTTSALAFQGVAASAASGDMARDAVEAGGRVELTVKVRSRIRARLAFWGNRHWHPLHVGCEVAVGPDGQLLAEYMQKRCSIDFF

SEQ ID NO: 80727 - protein, 224 aa, Zea mays
  Coding DNA Sequence Number=SeqID_38948
  Pfam annotation: Domain name=Hin1; Domain location=88-200; Score =15.2; E_value=7.9e-05; Accession=PF07320.4; Description=Harpin -induced protein 1 (Hin1)
MEENRQCVHVRSLRISGGKEKQNARLPKIREKALRPLKIPFTLHAIGDRRRAAHDVVPLRTQGDGKQASTVSDRGQAAISEAFICWPHASRELLSGQLSIRNPNRDIAFFYDRFYLSVEYRGADVVKGQALTAAPLYQPPKTTSALAFQGVAASAASGDMARDAVEAGSRVELTVKVRSRIRARLAFWGNRHWHPLHVGCEVAVGLDGQLLAEYTQKRCSIDFF

SEQ ID NO: 80728 - protein, 179 aa, Zea mays
  Coding DNA Sequence Number=SeqID_38949
MVSTWVSRLRMNSNFVAFASRTTISRSKEKHHGQPYLEAKINPHSQKAANKHADQNNHGRGRKEKALEQELAEMQNETPSSSTLDAVFNQNNFQFERPPQAQAAFQGLNPHVELYHFEKYARSEELHYRKRQSLGGAPSGRGRDRGPQQPKKFYCVFHDEDSNHPTRDCPETRNQSEYG

SEQ ID NO: 80729 - protein, 172 aa, Zea mays
  Coding DNA Sequence Number=SeqID_38950
MRGFHSAFQQVPVQGPSPFFLFHDYSNMVVLDAKATKFEFILRRDTQVLTILKVVFVLLNCVGSHGWELRWCVSEGKVFNVDLDDGMAESGPHYILAWPSFAHRGLDPAESCLPDPVKTWTSRSRRVRLIEGTFGLRTNKWKDVSDDAKNQMGNKLLTRFILPRGSEELVKE

SEQ ID NO: 80730 - protein, 51 aa, Zea mays
  Coding DNA Sequence Number=SeqID_38951
MTKVMLAEGIQSSRNGRTTLAQKQQKSATSSPKNNEGINPEYGITQQVLPD

SEQ ID NO: 80731 - protein, 107 aa, Zea mays
  Coding DNA Sequence Number=SeqID_38952
  Subcellular localization annotation: CTP_CleavageSite=8; ConfidenceScore=5.02e-01
MKPWRKTSRSSKSTTSFRRGLAATLSRLPVKAACIYVSFSHFDYYVDVSNIMRNLHKLESLTPYTNDHNQNKRTTLAQKQQKSATSSPKNNEGINPEYGITQQVLPD

SEQ ID NO: 80732 - protein, 216 aa, Zea mays
  Coding DNA Sequence Number=SeqID_38953
MGGSAADRDRRREIVAELAANREWHGLGRPSPSWVKAPDTTDGIYGPRPRTWVRHARRSLTITGGVGSGRTDRLVRLAQTSTVRDLREDEDRAREGPLAERKKMCFDVNEKKGRCFSPSAQKATSIGFIHNKLDNARRKGIFGFMIKAYTMKSVIETKVAVAPKLCIRELRLNRRKGNRLKRERPFSPHRFFYKPIVNVKGMTVISHRLRPVPINR

SEQ ID NO: 80733 - protein, 160 aa, Zea mays
  Coding DNA Sequence Number=SeqID_38954
MAEPTVRWGHRTVRCAPDSVRCANGSRTATVDCSVSGRKSGTGLSGDIQILFPGQRELSIGIGARPLQCGLSRLEMTMSSQEGEEKHWPPNDESTSSTGLSPTSNKCLIANNDGGDKSDDEEEYEDEESTSSQGKMRPTMWKKRRFAVSTPISTKKTKCS

SEQ ID NO: 80734 - protein, 118 aa, Zea mays
  Coding DNA Sequence Number=SeqID_38955
MEQSTVAVLEPLEHRTLSGAHQTVWCLHLTVGSVTRHARIARPTVGPADHWLTGQSGAPPDSLVHHRTVRTSQVIGPTCTCPCLKTADSYACAPNNLTGSVRVPRGPRINDLPPRSQD

SEQ ID NO: 80735 - protein, 358 aa, Zea mays
  Coding DNA Sequence Number=SeqID_38956
  Homolog annotation: Hit_ID=O42388; Match level="QueryCoverage=27%, HitCoverage=76%, E-value=5e-44, Identity=92%"; Hit description =Ubiquitin-ribosomal protein fusion protein
  Pfam annotation: Domain name=IQ; Domain location=190-210; Score=25.0; E_value=0.00027; Accession=PF00612.17; Description=IQ calmodulin -binding motif
  Pfam annotation: Domain name=IQ; Domain location=232-252; Score=27.0; E_value=6.6e-05; Accession=PF00612.17; Description=IQ calmodulin -binding motif
  Pfam annotation: Domain name=Ribosomal_L40e; Domain location=77-128; Score=13.4; E_value=0.055; Accession=PF01020.8; Description =Ribosomal L40e family
  Pfam annotation: Domain name=ubiquitin; Domain location=6-74; Score =138.0; E_value=2.5e-38; Accession=PF00240.13; Description=Ubiquitin family
  Pfam module annotation: Pfam domain module=IQ::IQ::Ribosomal _L40e::ubiquitin; Domain location=190-210::232-252::77-128::6-74
MQIFVKTLTGKTITLEVESSDTIDNVKAKIQDKEGIPPDQQRLIFAGKQLEDGRTLADYNIQKESTLHLVLRLRGGIIEPSLQALARKYNQDKMICRKTKPAAEGYNLAGEDSYPMDRRSMTPGISSRLSSPPPAAHPSPPPAAATPSHPPSPTPDAFTRLEESFGRLAEKWDQFVVMFHRYKEKTEKELQAAVRLQAAARGFLARRQVQSLRGEKHLAVASRAIPWPSSHEQAVVRLQAAVRGFLVRRAVRKLHLLISSSLHQLAACSPNHQVSSILFEPPAEVEIWVCSPPARPKRVISFIRATTLVLDRPNIRTGWFLLHLSSNLKDELVLKGGGDVMGIIGSERQHRGWDKARE

SEQ ID NO: 80736 - protein, 140 aa, Zea mays
  Coding DNA Sequence Number=SeqID_38957
  Gene Ontology: Mol. function=structural constituent of ribosome; Cellular component=intracellular; Biological process=protein modification process
  Homolog annotation: Hit_ID=O42388; Match level="QueryCoverage=98%, HitCoverage=100%, E-value=5e-60, Identity=84%"; Hit description =Ubiquitin-ribosomal protein fusion protein
  Pfam annotation: Domain name=Ribosomal_L40e; Domain location=77-139; Score=97.3; E_value=4.7e-26; Accession=PF01020.8; Description =Ribosomal L40e family
  Pfam annotation: Domain name=ubiquitin; Domain location=6-74; Score =138.0; E_value=2.5e-38; Accession=PF00240.13; Description=Ubiquitin family
  Pfam module annotation: Pfam domain module=Ribosomal_L40e::ubiquitin; Domain location=77-139::6-74
MQIFVKTLTGKTITLEVESSDTIDNVKAKIQDKEGIPPDQQRLIFAGKQLEDGRTLADYNIQKESTLHLVLRLRGGIIEPSLQALARKYNQDKMICRKCYARLHPRAVNCRKKKCGHSNQVSVIALESIAPLRAKKKIKN

SEQ ID NO: 80737 - protein, 55 aa, Zea mays
  Coding DNA Sequence Number=SeqID_38958
MEYIVFFGHVAALEPSTWWGQGTDNGPWARLRGGYEPEGGAKAGLSIGALLSCTR

SEQ ID NO: 80738 - protein, 107 aa, Zea mays
  Coding DNA Sequence Number=SeqID_38959
MAWTPPVSRVDRAHLMLRWHIACGWPHGSIGSPPEWGAGTYATWSGHVLAPDPRLALIKVRGSGPNVDTMEYIVFFGHVAALEPSTWWGQGTDNGPWARLRGGYEPE

SEQ ID NO: 80739 - protein, 82 aa, Zea mays
  Coding DNA Sequence Number=SeqID_38960
  Subcellular localization annotation: CTP_CleavageSite=24; ConfidenceScore=5.55e-01
MGAIKAKAQSTQGTRSRLARAQPRARAADPGGFTTRSRVPSNSERTFDSPEAQIGQASRRSNLGQIATPTDHIAGAFNARID

SEQ ID NO: 80740 - protein, 385 aa, Zea mays
  Coding DNA Sequence Number=SeqID_38961
  Homolog annotation: Hit_ID=Q6QP51; Match level="QueryCoverage=41%, HitCoverage=83%, E-value=5e-25, Identity=46%"; Hit description =Putative growth-regulating factor 1
MQAACNRTTRMHPFDFDASSMEAQAHTSRTEKGDTSKGILLREGSGPRALLLIRGSKAGPSEGVRQPPQSTRALSPPTGQRFEGWPLGRVRQPPQATRASRPLLIRGSKAGPPEGLDSRLRTCRARDDSWYVRYMAEARATLPRGSRAALANPTPAKPLIASTYQPENSEPDYAPGLRPVKAPPTQGTQSRLARAQPRERTSDPGFAEKQPWLDRHANRPYRRGIQCKDRLTPYPDARPSVDRAEQPSLASGAIGSSASPDPRAQAQPRPRKTVSALPDPRARTQPRPRKTVSATPDPRARTQPRPRKTVSASPDPRARTQPRPQTTVSVLARPQGSDSASTSEESPPRPTSGSDRPRRRGGTKTLRPIWLAPGFKRSSDGHDIT

SEQ ID NO: 80741 - protein, 86 aa, Zea mays
  Coding DNA Sequence Number=SeqID_38962
MEQAVYQMWLVRVLIYTLGTLQIGGSRLSLTVAILAKGRYLRTQDKSIHDEKSMIVTKVVVAPKLRARELRLIRGKRNRLKGEKAI

SEQ ID NO: 80742 - protein, 78 aa, Zea mays
  Coding DNA Sequence Number=SeqID_38963
MSRGRGVDSSHRVLLRMIGCCCDLAFVPATGIYGQEGGDEDNGFGYAYGNGCPRCNHCSGEDEVVEEDFQEFQEYDEF

SEQ ID NO: 80743 - protein, 85 aa, Zea mays
  Coding DNA Sequence Number=SeqID_38964
MEDHPPMDPGREAPNQWRERWHSRAGGTSEVEPGRIPWRTTFQLIQGVRHQFSGEKNKNRDCNGKWKVKALLIDNLGKDGMELKF

SEQ ID NO: 80744 - protein, 195 aa, Zea mays
  Coding DNA Sequence Number=SeqID_38965
MEDHPPMDPGREAPNQWRERWHSRAGGTSEVEPGRIPWRTTFQLIQGVRHQFSGEKNKNRDCNGKWKVKALLIDNLGIFTVSLHTLRRKRWNGTQILMVGQGLEQPTTIHASTSSSVSGVNVCATHQGYDNTTSLRNKYNRQNYCSVIGVHDKSTQRAQQAQSWLDDHGRQTVPTGHAKNTRLRDGGSTQRELSD

SEQ ID NO: 80745 - protein, 97 aa, Zea mays
  Coding DNA Sequence Number=SeqID_38966
MSKNTRDTRFIPRFGHTTKVPYFLVEAPTKSRVSFNPNPPFADHKDLKWERQEVCEREWEVFLRLGMESKSCSSVGKSVEGVYKGAPKSWWSLGKSD

SEQ ID NO: 80746 - protein, 82 aa, Zea mays
  Coding DNA Sequence Number=SeqID_38967
MSKNTRDTRFIPRFDHTNKVPYFLVEAPTKSRVSFNPNPPFADHKDLKWKRQEVCEREWEVFLRLGMESKSCSSVGKSVGGV

SEQ ID NO: 80747 - protein, 97 aa, Zea mays
  Coding DNA Sequence Number=SeqID_38968
MSKNKRDTRFIPRFGHTTKVPYFLVEAPTKSRVSFNPNPPFADHKDLKWERQEVCEREWEVFLRLGMESKLCSSVGKSVGGVYKGAPKSWWPLGKSD

SEQ ID NO: 80748 - protein, 97 aa, Zea mays
  Coding DNA Sequence Number=SeqID_38969
MSKNTRDTRFIPRFGHTTKVPYFLVEAPTKSRVSFNPNPPFADHKDLKWERQEVCEREWEVFLRLGMESKSCSSVGKSVGGVYKGAPKSWRPLGKSD

SEQ ID NO: 80749 - protein, 163 aa, Zea mays
  Coding DNA Sequence Number=SeqID_38970
MVSKCTAHVSWTEHAACQWNGQAHVLSVMKARVAQRRHAGFRPLAYAARSVPRGSIGAPPEWGAAVYADSHVAALEPPTWWGQALLLAQSSRSRLGRVMVWSHVQLLYHVTEDSRVGTASSYNSKGYPSFRNLGTTNATPYKESRPRDSKKRDDDGLFVIGSK

SEQ ID NO: 80750 - protein, 159 aa, Zea mays
  Coding DNA Sequence Number=SeqID_38971
MWHTTMWSENSNKSGPRTYDILMPHPFLKTNLDASQMCDRINSHTYGVLMSAIHAALMGSYRTSNAGVMVSKCTAHVSWTEHAACQWNGQAHVLSVMKARVAQRRHAGFRPLAYAARSVPRGSIGAPPEWGAAVYADRSVAHQNRSGHVLALDPRLGLK

SEQ ID NO: 80751 - protein, 54 aa, Zea mays
  Coding DNA Sequence Number=SeqID_38972
MADVSSQLIYSVAIYDPYSRPAAEFRLEPTHFCFEIPYRIIASTTTIIMSWGQL

SEQ ID NO: 80752 - protein, 280 aa, Zea mays
  Coding DNA Sequence Number=SeqID_38973
MAGVSCTLRSKRLDGGVFVLSVRKRQIFVASVLRWYPRKSARNEVREERILHLELLFKAIGRSFCLPCLCNRFRISISPMFCNVCKTGETFLERRTTRKHTGPIGVPCHQLAPRHDNSSSGSNDPIRDLEAEVSRLQAELRRRTAIWVVDGDRINELRRDVCHLRDQLADRDLALDWVVQSRSLAWAKEEKAQARVAELNLAVDDLQTYCNTLHEEVHVLYSQLHPSEPTNPVESEAGPSHVAGQTLGGELDLFQPPPSMRLVDEWSPTPNDEAAKSNRK

SEQ ID NO: 80753 - protein, 91 aa, Zea mays
  Coding DNA Sequence Number=SeqID_38974
MATSNPSRGMAQRFNRLGQWRRHQPAVCSQYLCDRADPPIPCELVRGHLDYTPHAWNIVPVKKRNGWVRMIVDACYPTNIKEETDPEYFCR

SEQ ID NO: 80754 - protein, 94 aa, Zea mays
  Coding DNA Sequence Number=SeqID_38975
MATSNPSRGMAQRFNRLDQRRRHQPAVCSQYLCDRADPPIPCELVRGHLDYTPHAWNIVPVKKRNGWVRMIVDACYPTSINEETDPEYFCRYRR

SEQ ID NO: 80755 - protein, 300 aa, Zea mays
  Coding DNA Sequence Number=SeqID_38976
  Homolog annotation: Hit_ID=Q1EPC6; Match level="QueryCoverage=37%, HitCoverage=6%, E-value=8e-09, Identity=31%"; Hit description=DNA helicase homolog, putative
MSDEQKNEKNKKRREARLRNKELNKKLPEARQRNNCQNMMPNAPRGGDKKVNVDPNDDSDCLHINYTVQSNDIDAPTEVLTPGSVHETVGHTPKHTTQRTAYFSERYKNLTPVEKEFRRERLRLYNRTPRRKEAKVDHNRRHRVMQADTLNPTSIAMEDPTYTPEFVHPTADAKGSDGSILSVCDWVIPEFVNAPFLPSPTQTEDVASPDMSTNTLKRKHHVPRGERQAILARRNQLFESAISRKVGTSIEDTSGDVVEGDDWTQRHTPMKITNNGDDDEGVIFEDDDDENEGYLFAAQL

SEQ ID NO: 80756 - protein, 1205 aa, Zea mays
  Coding DNA Sequence Number=SeqID_38977
  Gene Ontology: Mol. function=helicase activity; Biological process =viral genome replication
  Homolog annotation: Hit_ID=Q1EPC6; Match level="QueryCoverage=99%, HitCoverage=77%, E-value=0.0, Identity=67%"; Hit description=DNA helicase homolog, putative
MEDPTYTPEFVHPTADAKGSDGSILSVCDWVIPEFVNAPFLPSPTQTEDVASPDMSTNTLKRKHHVPRGERQAILARRNQLFESAISRKVGTSIEDTSGDVVEGDDWTQRHTPMKITNNGDDDEGVIFEDDDDENEGYLFAAQYEDTDEDIEIDGTQDESTATYVSDPYDKVYSNIPEETHMLKLVPNCGYCTAKKFEYEPPGFCCRGGKVELAPVETPPQLKRLWDSADSDARHFRDNIRFFNGHFSFTSLYCCLDSMTTNVRDSGIYTFRAQGMMYHNIKSFGREDGAEHKHLELYFYDDDPSLEHRYRKCREEHQQKDKEVINQIVDILRGNPYSEHLRTMGHVDNLDDYRIALNLDQTLNQKTYNAPLTSEVAAVWIEGSEGRGQFSKSVMLHGKDSSRHCIRSYHGCYDALSYPLFFPRGELGWHANIPKVGVSMDEVDAYRATHRASNANDEDAESPSHLCVFVRDYYCYKFQIRPGVFNPILHGKRLFQQFAVDTYIKIESSRLDFIRKNQDRLRADLYQGLVDSMLDGDIRAEKIGKRTVLSTSFIGGPRDMRRRYMDAMALVRKFGKPDIFLTMTCNPNWDEIRRELLPGQTPQDRPDLVVRVFHAKLQELKHRLTKQDILGKVRAYVYVVEFQKRGLPHAHFLLIMQRKYKLTCPEQYDLLISAEIPSNKYPELRKMVIKHMMHGPCGSLNPNCPCTKGRKSCKNHYPRPFSDTTLQGKDSYPVYRRRDDGRTEKVRGCELDNRWVVPYNPYLLRLFNCHINVEACGSIKAVKYLFKYIYKGHDRASVVMRDASKADDDVDEIKQYRDARWVTPPEALWRIYGFELSQISPPVMQLQLHLPNMHMVAFHERQMVERVVNRPGVDRSMLTTYFEANSLHKEARGILYRDFPKWYTWQSGKGKIWQKRKRDTGGQVGRIVSAHPAEGERYYLRVLLNHVTGATSYVDLRTVDGVTLPTFREAAERRGLLESDNTLDECLTERALFQMPSALRRLFATILVYCEPSDVVVLWQKHLDSMSEDYQHRNPCKTHVEQMVLIDIRNMLQSMGKDIKTFPLPPIMDAYDDAIGTAREVYEEEIIEPAAEDVALKDCLNKEQRAAYDKILSAVDTDQGGLFFVDGPGGTGKTYLYRVLLATLRSQGKIAVATATSGVAASIMPGGRTAHSRFKIPLTIDDGAVCSFTKQSGTAELLRKASLII

SEQ ID NO: 80757 - protein, 276 aa, Zea mays
  Coding DNA Sequence Number=SeqID_38978
  Homolog annotation: Hit_ID=Q6QP51; Match level="QueryCoverage=42%, HitCoverage=30%, E-value=2e-16, Identity=59%"; Hit description =Putative growth-regulating factor 1
  Subcellular localization annotation: CTP_CleavageSite=63; ConfidenceScore=5.30e-01
MQAACNHTKGAHSFDSDASSVEAQAHTSCGRKQRSSRLQAHVPSWDSERALTHGVKTTRRFTSAMMTASKRDRERGYFERDPSPRRKQAPSPPTDQRFEGWPLGRVRQPPQSTQAPRLLLIRGSKAGPSEGFDNCLRALRLRAHYWSEVRRLAPRRGSTAASSHSGSAPTTDQGFVGWLPKGSTASSEHAERGMTLGMFDTQPRLGLRSRGTLGHFRDQRERFCNGIPSEGGIETSDPIERDRVRQITCRLGGCSRKPGSGQTVDSVNIPARELGT

SEQ ID NO: 80758 - protein, 231 aa, Zea mays
  Coding DNA Sequence Number=SeqID_38979
  Homolog annotation: Hit_ID=Q6QP51; Match level="QueryCoverage=57%, HitCoverage=56%, E-value=1e-17, Identity=48%"; Hit description =Putative growth-regulating factor 1
MARSVRAQGRARRRLLLRPKPGSGEDAIPSEVEVEAEPWGRARRRPSSEAEVEAEPWGRARRRPPSEAEAGAEPWGRARQRPPPEAEAQGRARRSFLLCLRLNLAVVSLTLAGGTAVGAGQATLFSCQVGQWKGEVTAVTSALPTEERWFVDAINGLAVAGFARAAPEPLHRARGRSRTVSAFIIRPFVAFSQGGRGESAMLPSEGAEHGVSSDLPDPIPFDRVQGLDASL

SEQ ID NO: 80759 - protein, 178 aa, Zea mays
  Coding DNA Sequence Number=SeqID_38980
MVGTSAVTARAAAGVSGALYAKALYKEHRVPRCRVWLTLEAHPLQLCWHSLDSKTIGFRSDDTTEAAAMKTLTTFCDYHPLEMVMHPLGLFPAKKRDDPMWCNQVSHVKDVWAMHPDQVGRITVQRMSALYRLQALQSDVVANLTNLAQTTKLTLDSREDFMVDLSSELVEKTYRWNS

SEQ ID NO: 80760 - protein, 84 aa, Zea mays
  Coding DNA Sequence Number=SeqID_38981
MGTVDMCGDGVPLHVVCLGLPCKVRYRTWLMTTKLTLDSREDFMVDLSSELVEKDLQVEQLSQRIATLEQQVEIWDNTIDVLEN

SEQ ID NO: 80761 - protein, 55 aa, Zea mays
  Coding DNA Sequence Number=SeqID_38982
MGKGLATVVALGRHWRVAGRSPELRAGSGKSGEVMNYTTTFIFGPSHDHKVYMTF

SEQ ID NO: 80762 - protein, 135 aa, Zea mays
  Coding DNA Sequence Number=SeqID_38983
  Subcellular localization annotation: CTP_CleavageSite=58; ConfidenceScore=5.15e-01
MTTPHATAIKPVPVLGCLPRCLLRTSPDFPEPALSSQRPPRDPPVPPESNHRGQPLFSSSSVRSKPSDSFLVKKNRKDCNLADGEYVLVPEQGAAQEVAPDPAPESTSEDLPATSLEGKPRFMHNLLFMLFYYTY

SEQ ID NO: 80763 - protein, 239 aa, Zea mays
  Coding DNA Sequence Number=SeqID_38984
  Gene Ontology: Mol. function=transcription regulator activity; Cellular component=nucleus; Biological process=regulation of transcription
  Homolog annotation: Hit_ID=Q2QLR0; Match level="QueryCoverage=55%, HitCoverage=35%, E-value=1e-16, Identity=44%"; Hit description=Helix- loop-helix DNA-binding domain containing protein
MRKTKGATFAYRDRAFARLQMDKATILGDAVKYVRELQEKVKGLEEEGGAGGSGGIQSAVLVKKQLPPEDDAMASSHGGSGDHGGDGGGMPLPEIEARLSERSVLLLRIHCYSARGLLVRVISEVEQMQLSITHTNVMPFPASTAIITITAKVCLNVKPTIKSGNGKGDCGIVETRALYNRDITRGNCQKGRGGGGHHFVKNANARVEDGFNATVDEIVRRINSALHQHYSSSSEETRG

SEQ ID NO: 80764 - protein, 118 aa, Zea mays
  Coding DNA Sequence Number=SeqID_38985
  Gene Ontology: Mol. function=DNA-directed RNA polymerase activity; Biological process=transcription
  Homolog annotation: Hit_ID=Q6ZA50; Match level="QueryCoverage=63%, HitCoverage=39%, E-value=1e-12, Identity=76%"; Hit description =Putative DNA-directed RNA polymerase II 13.6K chain
MPLTVMSVSSCQRAPRSEPFTILALLSTCMQSFTQLIFVVHDSGKVSYERDTQILNAASFTVEREDHTVGNILRMRKDAQALAWRIQRLRSNGFQQHAHSDVHPLAEEMCIRMVDRTF

SEQ ID NO: 80765 - protein, 118 aa, Zea mays
  Coding DNA Sequence Number=SeqID_38986
  Gene Ontology: Mol. function=DNA-directed RNA polymerase activity; Cellular component=nucleus; Biological process=transcription
  Homolog annotation: Hit_ID=Q6ZA50; Match level="QueryCoverage=63%, HitCoverage=39%, E-value=1e-12, Identity=78%"; Hit description =Putative DNA-directed RNA polymerase II 13.6K chain
MPLTVISVSSCQRAPRSEPFTILALLSTCMQSLTQLIFVVHDSGKVSYERDTQILNAASFTVEREDHTVGNILRMRKDAQALAWRIQRLRSNGFQQHAHSDVHPLAEEMCIRMVDRTF

SEQ ID NO: 80766 - protein, 131 aa, Zea mays
  Coding DNA Sequence Number=SeqID_38987
MGQRTLAFTKLLLRDLFCNLLGKHRLPVVYVKAVRSKMDGGDLAAGFCPPLRLAEAAAPVPEAGSSPETRGAGALRVLRATGMAGEVGEGAGSLLVGARSGQGHRRGWSTAKWLGGGANRLRRGIKRSRAQ

SEQ ID NO: 80767 - protein, 108 aa, Zea mays
  Coding DNA Sequence Number=SeqID_38988
MGQRTLAFTKLLIGDFLCNFLGKHRLLVVNAGTGAPEGGGPRRSGSAAALKDSGEELSAAGAVKKGRERAREVPYLKANSGDSSVAAKTQWLPESTVADPGDCAQNGW

SEQ ID NO: 80768 - protein, 802 aa, Zea mays
  Coding DNA Sequence Number=SeqID_38989
  Gene Ontology: Mol. function=cysteine-type peptidase activity; Biological process=proteolysis
  Homolog annotation: Hit_ID=Q53MK8; Match level="QueryCoverage=42%, HitCoverage=38%, E-value=1e-22, Identity=24%"; Hit description=Ulp1 protease family, C-terminal catalytic domain, putative
  Pfam annotation: Domain name=Peptidase_C48; Domain location=546-792; Score=-7.1; E_value=0.0019; Accession=PF02902.9; Description=Ulp1 protease family, C-terminal catalytic domain
MKQVDRPPNNPKRITIQSSQECFSVDIPSAEQPNPCPEVENPPNADSQNVTNETVQIDSDEDDFMPALKKRNVSESHTRVLRKVVTKRIKHEELPRQLDPKDMTIRPGPGKELKITKDIVHLILGVPNHGGGKPLGIDEAVAASNLRAELGVAKDEFNVAFLQDRLRKGEDDDLSIRCFFLILFNRLLFPTASWGITYHEVLLTEEMHRFHEIDWCQLIFNDLCKAAKKWHNRITTNVSTTIYGCSIVVLLYYLDHLHTAASPQNKSGTPRIKFFDKNSIKALTKADKRKVRHGAESFGHCEPECRTNIFDAPRPAPMPRPTFNIKLPSIKEMMSSKINDLPHRHRSKFTDILAGYDLEVDKSCVAIKDSIDKIIEKQYDIADKFIELIDEVLRAESENLENETDEPQQPGNSADSAGHTVDATQPTPDMPSQASQLETQLGGTQFEEIHERQQHIRRVLETCPDESDVVSDQQRGEMATEEMEHNDSGPVFDQTPTPHDDTLKGTTNSGSDPPLTEQECVRSLWDLICSKDIDQSRVVIDYGEYSANCMDIYESFAEGKCLENVFMQCFIECVRDDSKNHCRTLTSNRLILDVNVGALLNFEEQERHSKNPQPFDQNVLQNCLHNTLPALANLDKCKSILVPMLSRGHWTLYVINLHHRVVHILDSNPYGIQLGGTEWKDYHYDPIYLGGRKFPWARVIMSRLSKALQHVCPNAEFPKFGNFPLDMPSNYPTMRTGSNDCGFFVMSYMKSYDHNAGVISSFNQPDNSRDLRAHALHQLTFHRINKALPLPLDIQRFMFARN

SEQ ID NO: 80769 - protein, 126 aa, Zea mays
  Coding DNA Sequence Number=SeqID_38990
  Gene Ontology: Mol. function=cysteine-type peptidase activity; Biological process=proteolysis
MPRPTFNIKLPSIKEMMSSKINDLPHRHRSKFTDILAAYDLEVDKSCVAIKDSIDKIIKKQYDIADKFIELIDEVLRAESENLENETDEPQQPGNSADSAVIDHMYFRKELLNLYYSESLQFSVRI

SEQ ID NO: 80770 - protein, 385 aa, Zea mays
  Coding DNA Sequence Number=SeqID_38991
  Gene Ontology: Mol. function=hydrogen-translocating pyrophosphatase activity; Cellular component=integral to membrane; Biological process=proton transport
  Homolog annotation: Hit_ID=Q06572; Match level="QueryCoverage=77%, HitCoverage=43%, E-value=1e-122, Identity=73%"; Hit description =Pyrophosphate-energized vacuolar membrane proton pump (EC 3.6.1.1) ...
  Homolog annotation: Hit description=(Pyrophosphate-energized inorganic pyrophosphatase) (H(+)-PPase)
  Pfam annotation: Domain name=H_PPase; Domain location=1-383; Score =54.3; E_value=4.3e-26; Accession=PF03030.7; Description=Inorganic H+ pyrophosphatase
MARVRDRTKHFKGVAMLSHGYIEKMGTTRKRRSLWLRGIVVNGKSTSELLSGSVSLRSAEVVGTPVGRIVKCEEFLKAAGPVMAVKEIEPALKKQLIISTTLMTVGIAVISWLALLAKFTIFNFGTQKDVSNWGLFFCVAIGPWAGLIIGFVTEYYTSNAYKFKAYKTGAVTNVILGLALGYKSVIIPIFAIAVIIYVSFSIAAMYDIAVAALVTMLVVLLRTDAVDAAGNTTAAIGKGFAIGSAALVSLALFGAFVSRAGVKVVDVLSPKVFIGLIVGAMLPYWFSAMTVKSVGSAALKMVEEVRRQFNTIPGLMEGTAKPDYATYWKISTDASIKEMIPPGALVMLTPLIVGTLFGVETLYGVLAGALVSGVQPSFSLNRKEL

SEQ ID NO: 80771 - protein, 371 aa, Zea mays
  Coding DNA Sequence Number=SeqID_38992
  Gene Ontology: Mol. function=hydrogen-translocating pyrophosphatase activity; Cellular component=integral to membrane; Biological process=proton transport
  Homolog annotation: Hit_ID=Q06572; Match level="QueryCoverage=80%, HitCoverage=43%, E-value=1e-122, Identity=73%"; Hit description =Pyrophosphate-energized vacuolar membrane proton pump (EC 3.6.1.1) ...
  Homolog annotation: Hit description=(Pyrophosphate-energized inorganic pyrophosphatase) (H(+)-PPase)
  Pfam annotation: Domain name=H_PPase; Domain location=1-369; Score =35.4; E_value=2.2e-25; Accession=PF03030.7; Description=Inorganic H+ pyrophosphatase
MARVRDRTKHFKGVAMLSHGYIEGIVVNGKSTSELLSGSVSLRSAEVVGTPVGRIVKCEEFLKAAGPVMAVKEIEPALKKQLIISTTLMTVGIAVISWLALLAKFTIFNFGTQKDVSNWGLFFCVAIGPWAGLIIGFVTEYYTSNAYKFKAYKTGAVTNVILGLALGYKSVIIPIFAIAVIIYVSFSIAAMYDIAVAALVTMLVVLLRTDAVDAAGNTTAAIGKGFAIGSAALVSLALFGAFVSRAGVKVVDVLSPKVFIGLIVGAMLPYWFSAMTVKSVGSAALKMVEEVRRQFNTIPGLMEGTAKPDYATYWKISTDASIKEMIPPGALVMLTPLIVGTLFGVETLYGVLAGALVSGVQPSFSLNRKEL

SEQ ID NO: 80772 - protein, 61 aa, Zea mays
  Coding DNA Sequence Number=SeqID_38993
MGTYSWLRSWNTYAMHPVLPLETGVTHCVHHPLYEKLPLHTDDMEISDVRAQEDCSGSKHL

SEQ ID NO: 80773 - protein, 370 aa, Zea mays
  Coding DNA Sequence Number=SeqID_38994
  Subcellular localization annotation: CTP_CleavageSite=22; ConfidenceScore=5.38e-01
MWEAKPRLSSFPTTARLMNILEAKHRWKSAAPTRPRTSSRGKTRPVAPACGIPFRALTQSGRARDEVTRPWQTTATRNRDLESKGAQGARRRKDAASGREARHGCYLREKSHRRSLQCRVSSGPSQKTEKINFQNQCSDSRHPAHGPTKTLSAEVMGQSAAGTGMAVCVTMGGLTVIASTGAQGQRANRQSDFGPACRLVSSPEAGPRATVGTLNQGYPLLQYEDEDVSVGPDLREGAPAPVCTTRTPDYGPGLPSLILCDSLLRRRPDAATWLVARDISQQAEPDVMPLGRTVFAFIAERTRRLSTLLTGDVPPQHLMCPVHSAGRWRQGHPTDGAPVQSIVKQCARAARHTVLIIPYTRSFPCTPMLR

SEQ ID NO: 80774 - protein, 194 aa, Zea mays
  Coding DNA Sequence Number=SeqID_38995
MPRRQALKEEQCREEKGISTIPKHKYASKACSPKGQGSVHSRDTISPRLSPASGRNSRPRQIHASPEGLLKQRAHPRLARGPVRAGFAVKQPWPDRLANRPYRRSIQCKDRQTPYPDARSSVGRTEEALSRPTPGLSLNLDLGRRSPPRLTPGLGLDLDLGGVTASSDLGLGLTTPQGGLKHSSDGHDATCTGH

SEQ ID NO: 80775 - protein, 170 aa, Zea mays
  Coding DNA Sequence Number=SeqID_38996
MPRRQALKEEQCREEKGISTIPKHKYASKACSPKGQGSVHSRDTISPRLSPASGRNSRPRQIHASPEGLLKQRAHPRLARGPVRAGFAVKQPWPDRLANRPYRRSIQCKDRQTPYPDARSSVGRTEGSASTSTSGRRSPPRLTPGLGLDLDLGGVTASSDLGLGLTTPQG

SEQ ID NO: 80776 - protein, 135 aa, Zea mays
  Coding DNA Sequence Number=SeqID_38997
  Subcellular localization annotation: CTP_CleavageSite=50; ConfidenceScore=5.65e-01
MAPLVSRFVVFPAVPSSRSPPAIASVPSSVFSPHREVWHRSVPPPLTSVLAGTASPWRLIGGAVRHLWAALCKLTGALRHTATDTVHHSPTSIARPELTDGNPAAKLRRLPADSPLPAPSSQIEPTSRLASPSPC

SEQ ID NO: 80777 - protein, 110 aa, Zea mays
  Coding DNA Sequence Number=SeqID_38998
MAPRYVLRWHKRTSWRRRGTELGAIDLGAELSFVYKAGLAQLIFRLWLRLKSAEIFLIAGMRCIGVDTSDIVVLAARDAVVFASNSPTGSNLLAFFFYANNVLKTFFFVR

SEQ ID NO: 80778 - protein, 75 aa, Zea mays
  Coding DNA Sequence Number=SeqID_38999
MAPRYVLRWHKRTSWRRRGTELGAIDLGAELSSVHKAGLAQLVSPYGSPGVEMERQRPHGPRGAARVDWMPCTRA

SEQ ID NO: 80779 - protein, 45 aa, Zea mays
  Coding DNA Sequence Number=SeqID_39000
MGSRYSACSAEAGCRGSFVLLLLVTLLRGEYFLSEEVAFGAIYAQ

SEQ ID NO: 80780 - protein, 63 aa, Zea mays
  Coding DNA Sequence Number=SeqID_39001
MGSRHSACSAEVGCRGSFVLLLLVTLLREEYFLSEEVAFGAIYAQSNTKHKKNPFIKQVIKER

SEQ ID NO: 80781 - protein, 89 aa, Zea mays
  Coding DNA Sequence Number=SeqID_39002
MGSRHSACSAEAECRGSFVLLLLVTLLRGEYFPSEEVVHIAATAQEKTKPWKETSRSSKTTTSSRCGLAANPQSAACEGPIFTAFRLAL

SEQ ID NO: 80782 - protein, 89 aa, Zea mays
  Coding DNA Sequence Number=SeqID_39003
MGSRHSACSAEAECRGSFVLLLLVTLLRGEYFLSEEVVHIATTAQEKMKPWKETSRSSKTTTSSRCGLATDPQSAACEGPIFTAFRLAL

SEQ ID NO: 80783 - protein, 173 aa, Zea mays
  Coding DNA Sequence Number=SeqID_39004
  Homolog annotation: Hit_ID=Q94KM3; Match level="QueryCoverage=47%, HitCoverage=38%, E-value=6e-22, Identity=62%"; Hit description=MURB -like protein hMURB17
  Pfam annotation: Domain name=Zea_mays_MuDR; Domain location=1-173; Score=124.7; E_value=2.6e-34; Accession=PF05928.2; Description=Zea mays MURB-like protein (MuDR)
MDRTAPVVAVAEAVDAARAAAVAAAEARCAALVAEKEARAAVESATIAADKVNLAVFAVKYRRFVEDDSTVESQGTGLLFIQIRVSSSEACIPEVEGGKVGKLAGHLKEVCKSLEKTSIVCEEDLGNKCPGWDLDHPLSDVEDNSNPSDFEDQVDGYVSEDPELWEMVFEDMK

SEQ ID NO: 80784 - protein, 224 aa, Zea mays
  Coding DNA Sequence Number=SeqID_39005
  Homolog annotation: Hit_ID=Q94KM3; Match level="QueryCoverage=75%, HitCoverage=79%, E-value=1e-46, Identity=57%"; Hit description=MURB -like protein hMURB17
  Pfam annotation: Domain name=Zea_mays_MuDR; Domain location=1-223; Score=313.2; E_value=4.5e-91; Accession=PF05928.2; Description=Zea mays MURB-like protein (MuDR)
MDSTAPVVAVAEAVDAARAAAVAAAEARCAALVAEKEARAAVEYATIAADKVNLAVSAVNYRRFVEDDSTVESQEHVDLKYHISIKNSLRYAIQEMRRQSSLLQNMNRLCCSIPEVEGGKVGKLAGHLKEVCKSLEKTSIVCEEDLENKCPGWDLDHPPSDVDDNSHPSDFEDQVDGYVSEDPELWEMVFEDMKWEQNKVPVSLFEHCRIMGYDYDQMFDRETK

SEQ ID NO: 80785 - protein, 132 aa, Zea mays
  Coding DNA Sequence Number=SeqID_39006
MCLILRYLFLTCVGGCETARVSSHTFIAQQVVGNNVYELAKGPPSQQNPPEGLPTLTTPLLPLPLSGKGLIRKTNSRKGIGPSKPTDEERMAQIRSIPRITDARPVRSDSDPTVQMDPAPIRVSTDRSKING

SEQ ID NO: 80786 - protein, 80 aa, Zea mays
  Coding DNA Sequence Number=SeqID_39007
MRLILRYLFLTCGGCETARVSSHTFITQQVVGNNVYDLAKVGAHEVKLQCRNPLPDRHRSKINQGPPYTDHSPTALAPFG

SEQ ID NO: 80787 - protein, 88 aa, Zea mays
  Coding DNA Sequence Number=SeqID_39008
MNVCELTLAVSHPPPTGQEQVPQDEALEGCCVEFVSGLGRRLPVNFGLLDRCLLIIDKDDKAAGGGGCNDVPAKPRYLYLIPASLEII

SEQ ID NO: 80788 - protein, 115 aa, Zea mays
  Coding DNA Sequence Number=SeqID_39009
MKDCPSRLRTGLSSLLTYTLIKYNNSRLYAQSLDLNFYGPNPRIMMAGEHREDKEGECFVRFGHGGGLVPSGIIAKKRRSLIGLLRLVIVSHLSPEDWGASGGIGAVRLAAGRNP

SEQ ID NO: 80789 - protein, 128 aa, Zea mays
  Coding DNA Sequence Number=SeqID_39010
RIGALQVVLELLGWPQGVTLRSQMEVRCQTSFCENEDGFPKLLRACTVRLRIRSQPEYDGREFVEHGTKKETVQFGWPGCVHWKGSSRLRMTPQSSQARVAALESREVIAVEALKQAKDEHVQKLMEA

SEQ ID NO: 80790 - protein, 105 aa, Zea mays
  Coding DNA Sequence Number=SeqID_39011
MKAKSHHQPIKEYNGSSSLISCEKQMIRIEFNLASYLYVIWHNKSTDADINTNTSTSTPAAPSPSPGATPSTWASDSGPCKRIELHHVVKERRPGRIDDQPNCGP

SEQ ID NO: 80791 - protein, 121 aa, Zea mays
  Coding DNA Sequence Number=SeqID_39012
MKAKSHHQPIKEYNGSSSLISCEKQTIRIEFLTLQVAALVPTISRMGDPVSGRVRDKVRARLHSGIRTLILIPILSHRQRIPMDPCPQTIILLLSKWIQPIPDLARVLEKSLDFYRDPDLA

SEQ ID NO: 80792 - protein, 113 aa, Zea mays
  Coding DNA Sequence Number=SeqID_39013
  Subcellular localization annotation: CTP_CleavageSite=66; ConfidenceScore=5.22e-01
MGNSEVDDTKAFGIASTSSARLEKGGGGRAAWNSSPMPLGPVALVAKLLQGATGVSSTSLWEKNPRCAVNSSMEPLTAVEPLHAGVRPFRCSNHWSFTPSPLLFSDFEAQSRN

SEQ ID NO: 80793 - protein, 84 aa, Zea mays
  Coding DNA Sequence Number=SeqID_39014
  Subcellular localization annotation: CTP_CleavageSite=56; ConfidenceScore=5.16e-01
MGNSEVDDTKAFGIASTSSARLEKGGGGRAAWNSSPMPLGPVALVAKLLQGAAGVSSTSLWEKNPRSFTPSPLLFSDFEAQSRN

SEQ ID NO: 80794 - protein, 119 aa, Zea mays
  Coding DNA Sequence Number=SeqID_39015
  Subcellular localization annotation: CTP_CleavageSite=66; ConfidenceScore=5.12e-01
MGNSEVDDTKAFGIASTSSARLEKGGGGRAAWNSSLMPLGPVALVAKLLQGAAGVSSTSLWEKNPRCAVNSSMEPLHAGLADLGRVDEGLHRGVGRRIPGVWAEKKLWGPVGHAMDGRD

SEQ ID NO: 80795 - protein, 106 aa, Zea mays
  Coding DNA Sequence Number=SeqID_39016
MGILLPELADLGRVDEGLHRGVGRRIPVKCLSPVYMPAWLSERCLSPVYAITWPSEKCLSPIEAQLARLLLRPRPGSGEKAIPPEAEAEAEPWGWARRRPPPEAEA

SEQ ID NO: 80796 - protein, 126 aa, Zea mays
  Coding DNA Sequence Number=SeqID_39017
MYYVEYGFFPISCLSNIGEDIGVKDVKGKCALGPFLSILVIECKHKGLNVKICLWMNKVQITSKGERRKEKKWRVAVYSQRLLQTGAPDCPGERLQVVEIPRKREKIKGKKNTVVFKLIIGSLERS

SEQ ID NO: 80797 - protein, 146 aa, Zea mays
  Coding DNA Sequence Number=SeqID_39018
  Subcellular localization annotation: CTP_CleavageSite=27; ConfidenceScore=5.65e-01
MNQSLPPSFTIASQFLFSPNLFSAPPRVSRRGQPSLGWFMPLCWMLKGKCALGPFLSILVIECKHKGLNVKICSWMNKVQITSKGERRKEKKWRVAVCSQRLLRAGAPDCPGERLQVVEIPRKREKIKGKKNTVVFKLIIGSLERS

SEQ ID NO: 80798 - protein, 110 aa, Zea mays
  Coding DNA Sequence Number=SeqID_39019
  Subcellular localization annotation: CTP_CleavageSite=10; ConfidenceScore=5.12e-01
MVLASAPCAACSVRRRAHVLMAPLPAFSLSPAISSKDSPLPSLLSDVRQVFDTMPARKIYCHSTIDARRERHPVFCVEKKASRSTLVDVRSDAQIRIAIILTNTDWVCLW

SEQ ID NO: 80799 - protein, 92 aa, Zea mays
  Coding DNA Sequence Number=SeqID_39020
MAASSLLQLLDAPCFFSLAQQQPAISLSTTELPPKDNVPPLLLLALSLPYAGENPVFCVEKKASRSTLVDVRSDAQIGITVVLTNTDWVCLW

SEQ ID NO: 80800 - protein, 161 aa, Zea mays
  Coding DNA Sequence Number=SeqID_39021
  Subcellular localization annotation: CTP_CleavageSite=50; ConfidenceScore=5.48e-01
MSPCSTTRAHPPGSLRPTQPSSLGFIYRPQPLLPLVSSHQNQIQTPTLVREREREPRSECIYQRRPRPRLELGSSRRVSVLREVAGEALVADWGGINHCVDQNSSSVAGFRHALWVGLGALRISVPSNLDLSDLSQNHSVKKHKGYEGWNEAEAVRKGASA

SEQ ID NO: 80801 - protein, 54 aa, Zea mays
  Coding DNA Sequence Number=SeqID_39022
MEKNKDVFAWSSIDLVGVPSNLDLSDLSQNHSVKKHKGYEGWNEAEAVRNGASV

SEQ ID NO: 80802 - protein, 75 aa, Zea mays
  Coding DNA Sequence Number=SeqID_39023
MAKSVPSELAVCSYLYAYGVASGRVPLVIDCCYSSKGKVPSHLDLSDLSQNHSVKKHKGYEGWNEAEAVRKGASA

SEQ ID NO: 80803 - protein, 57 aa, Zea mays
  Coding DNA Sequence Number=SeqID_39024
MTPHGPDEDPHSDNCFESNLVPLNLDLSDLSQNHSVKKHKGYEGWNEAEAVRKVASA

SEQ ID NO: 80804 - protein, 177 aa, Zea mays
  Coding DNA Sequence Number=SeqID_39025
  Homolog annotation: Hit_ID=Q6QP51; Match level="QueryCoverage=83%, HitCoverage=59%, E-value=5e-15, Identity=46%"; Hit description =Putative growth-regulating factor 1
MEHAGVPSLLVYRGEPDGTPVFVPRSPELARGPSPRSGEAEAPPRSRLSPSSEVEAESEPWGRARRSPSSEVEAESEPWGRARQSPSSEVEAESEPWGQARRRPSSDVEVEPELWGRAGQSFLWRPRLDLAAISLTLSSGTAVGAALAALFSCQVGQWSGEVTAVTSALSTEECALG

SEQ ID NO: 80805 - protein, 55 aa, Zea mays
  Coding DNA Sequence Number=SeqID_39026
MSGYFNEVSTAAFQLGNRIEGYKILFDALISVYENQVAVSRRMSLFEDCYQLLFE

SEQ ID NO: 80806 - protein, 900 aa, Zea mays
  Coding DNA Sequence Number=SeqID_39027
  Gene Ontology: Mol. function=steroid hormone receptor activity; Cellular component=nucleus; Biological process=regulation of transcription, DNA-dependent
  Homolog annotation: Hit_ID=Q1T213; Match level="QueryCoverage=89%, HitCoverage=61%, E-value=0.0, Identity=56%"; Hit description=IMP dehydrogenase/GMP reductase
MVSASNPERWDQWGGGRATTGEKALRDDHMSGQGGAHGALLLQGKGRESLALLRGGDDRLYGGDGRNQLGGDGWRGRRGHDDVGPCGLSEGIVVYDMRFELNEVEARRESYPSTISFLKLINALIVEERNISDKGRRFMGIFKFVYEDVFGPFPQRAYADPLEKWELALACLEHFRMVLSMYDIKDDDIYASVNTLAPSSLERQLPLLELLKDFMSGKVAFRNIMNIILVGVDSIINERTTQTYGIILERTVLLSLEIFILVMERDLALADVFRPLYQPLDVILAQSHRQIVALLEFVRYDYLPQIQQCSIKIMGILSSRIVGLVQLLLKADVGKMVIEDYAACLEFRFDDFQLLVDNICRPAPNITHLLLGFDVNGSIEQTVLKPKSQYSCLKIILDNLEKATKPDINSLLHEFSFQLLYELCLDPLTCGPVMDLLSTKKYQFFSKHVGTIGVTPLPKRNSNQSLRISMLHERAWLLKMLALALHISDISSSVYREACMAILYHTFGQCAENFQSTSLIHSHDALTSISDVPAKRNKVLDLLEVLQFRCPDTSTKYPQLLSSLGIESKIEEILRNSATFENGGVYYYSERGDRLIDLDAFREKLLQISQELNSQLTEPEKAGLKESVHHLLKWAWRYNKNLEEQAAQLHMLTGWSQIVEVAVSRRMSLFEDCSQLLFELLDASLNATTSPDCSVKMAYVLTNVSLTCMAKLRDERFICPAGTDSDAVTCLDIISSKQLPNAACNSLLFKLVMATLRNESSEILRRRQYALLLSYFQYCSSILDSDVPPSVLRFLLLEEQDGDDEDITLQKVLKEHNELAHANFSIIRKEAQAIVDLVTKDAFHGSEAGKALSFYVLDALISIDHEKYFLNQLQSRGILRSCLSDVANYLSKICCPNWRL

SEQ ID NO: 80807 - protein, 66 aa, Zea mays
  Coding DNA Sequence Number=SeqID_39028
MDILMIRNLGEDQQGLGKGLGVEEEQQGRPQQEGDQVRLGCDSISGISLRGKVTRVSRVITNEAVV

SEQ ID NO: 80808 - protein, 169 aa, Zea mays
  Coding DNA Sequence Number=SeqID_39029
MDVLMIRNLGEDQQGLGKGLGVEEEQQGRPQQEGDQVRLGCDSISGISLRGEVTRVSQGKLAEIPEDASLHKNLKLGPKNQMDKDKGPKLNDDECVSQMELKEMMHMMIEAFKKYQDSAATSYEQLDRRVVELVTRMDVLEARPPPPTPAPAHSLVDDDDDDDDVYAPL

SEQ ID NO: 80809 - protein, 239 aa, Zea mays
  Coding DNA Sequence Number=SeqID_39030
MAPYPVLPQQQVQVSGAEVGVRLVCGPFSVMGNLSSGAVAHGSFAPYSTILCQESGLQHPTSSTPLDLEGEAGVRVQHLLLHNWEAKHPPTNKFSILPPALTPSLSKNSKTQLFHNLQQHGFENPKYKVYFHKSYPSNEKDSQGYTGFWESRHLAYANHLLSSLQFTGLLLNGLMPTESTDTPPSSLLPLRVHATLVISPLPLCGGLSSIGPTEAKLTHDEACGQLKGPRSSSLHRFGP

SEQ ID NO: 80810 - protein, 115 aa, Zea mays
  Coding DNA Sequence Number=SeqID_39031
MAMMGSTSEKMYLCQDRTDVGLLIEDLLTGHMPRHGVILEALGGAAVLIVRGSRPPRRSGKGDASEIEILQQVCEAKWMTKTLAEQVYKAERMAKSSAEQVCEAKRMIKYPTEQV

SEQ ID NO: 80811 - protein, 162 aa, Zea mays
  Coding DNA Sequence Number=SeqID_39032
MTLLWPSIVAGRNQWLRLGKLAVVPTLVAATSPTAAVGAKGASQDPWSTFYASGEISSAAAAKYVAGSVSHQLRHASQQLKHSLLPKSSVSGRSIRMLFGRSRLRKNKSRRLTERLAAAEAKKGDLWRQLVEERRDANKAIADAQAAQAEAKLARVEASLAR

SEQ ID NO: 80812 - protein, 147 aa, Zea mays
  Coding DNA Sequence Number=SeqID_39033
  Subcellular localization annotation: CTP_CleavageSite=37; ConfidenceScore=5.56e-01
MREAKDMRPVTIVGSTPSSSYSHSRKRRPTSWPGTSKAALLGALAGETGLRPRKFDLSLSCLRIGNGLVRVPPLLHQLTPEIPLLGVGTCYQSQEGQQGARYNGPDSTWASELDEAASGMPSSPVFVWCRSSEGDQFDKVTWCRRRR

SEQ ID NO: 80813 - protein, 98 aa, Zea mays
  Coding DNA Sequence Number=SeqID_39034
MEKRPQELTSFGKLQRIVRYNSPDCPATFTDRAPGLRPGRMREQQGRPRHRKKLRPQRSQTTPPRPRGLHPAGALARTYRNKIQPRRAGPLAKIRQNL

SEQ ID NO: 80814 - protein, 301 aa, Zea mays
  Coding DNA Sequence Number=SeqID_39035
MSRLLDCGTSAVTRGIPARDPTVPIECNDHGSVSRGERRDGRNDQRRTGSNCSSRRAEAAVKSPTGSHPLLRRQGSPLPRSKDDAPVFHSSNGSRTRNRRPANRPSRRINSLAGQATPPGPGKGDISKKDPSQRRKRAPSPPTHQGFEGYALRGSATAPEHAESGMTLGTSVTWPRLGLRSRGTLGHFRDQRKRFCNGIPLEGGIEPSDPIEWARSGKSPAEARGLLSHQATAELLTTSTNLRENSKPNRAPGPRSGRMREQQGRPRHRKRLRPQRSQTTPPRPRGLHPAGALARTHRNKI

SEQ ID NO: 80815 - protein, 110 aa, Zea mays
  Coding DNA Sequence Number=SeqID_39036
MALFSQRLLGLGCTGLSGGAPDSVRCLGAIKGTPRRMEEYTKHPLSIVDHSHFILAHLFDILSDLSSVLDHLFTPPLGALNSQKMKMNGEERGGKQAVWAAPDSLVPLTG

SEQ ID NO: 80816 - protein, 86 aa, Zea mays
  Coding DNA Sequence Number=SeqID_39037
MARVARTLLATDRLKGVVYSRVARTCSCSGGSVGIVDIKHTLESLFLSRVRKRRIFVAFAPRWYQMKENRSEDAGGLGPPYRIFLF

SEQ ID NO: 80817 - protein, 86 aa, Zea mays
  Coding DNA Sequence Number=SeqID_39038
MARVARTLLATDRLKGVVYSRVARTCSCSGGSVGIVDIKHTLESLFLSRVRKRQIFVAFAPRWYQMKENRSEDAGGLGPPYRIFLF

SEQ ID NO: 80818 - protein, 86 aa, Zea mays
  Coding DNA Sequence Number=SeqID_39039
MARVARTLLATDRLKGVVYSRVARTCSCSGGSVGIVDIKHTLESLFLSRVRKRQIFVAFAPRWYLMKENRSEDAGGLGPPYRIFLF

SEQ ID NO: 80819 - protein, 86 aa, Zea mays; identical to SEQ ID NO: 80818
  Coding DNA Sequence Number=SeqID_39040

SEQ ID NO: 80820 - protein, 211 aa, Zea mays
  Coding DNA Sequence Number=SeqID_39041
  Gene Ontology: Mol. function=GTPase activity
  Homolog annotation: Hit_ID=Q010M4; Match level="QueryCoverage=61%, HitCoverage=30%, E-value=1e-20, Identity=36%"; Hit description =Homology to unknown gene
  Pfam annotation: Domain name=DUF258; Domain location=65-211; Score= -40.6; E_value=7.9e-11; Accession=PF03193.7; Description=Protein of unknown function, DUF258
  Subcellular localization annotation: CTP_CleavageSite=47; ConfidenceScore=5.11e-01
MPLFPSTAVALPRLSIPFPFPLHHSPIPLPLLLRRHHSSPHPRLLPLAASLPPPPPEELLHSQATGLVAASQANFMRVIVDATAPGLDHHRGSDLLCVVRALLKKIRRRVLVGDRVLVGAVDWTDRRGMIEDVFERRSEVVDPPVANVDRLVVLFSLDQPKPEPATLTRFLVEAESSGIPFVLVFNKVELVDEQDLPVIHINITISINGQN

SEQ ID NO: 80821 - protein, 339 aa, Zea mays
  Coding DNA Sequence Number=SeqID_39042
  Homolog annotation: Hit_ID=Q010M4; Match level="QueryCoverage=48%, HitCoverage=38%, E-value=3e-20, Identity=33%"; Hit description =Homology to unknown gene
  Pfam annotation: Domain name=DUF258; Domain location=191-337; Score= -33.1; E_value=2.6e-11; Accession=PF03193.7; Description=Protein of unknown function, DUF258
MGGSGATTCPEKVTYSEVSPVSTDPHGKTPYMGSRPSTVGSQGPRTEHTRSLIRTQAGSDADTCPDLILWDPDLITYTPAPRPGGDPMLPRGLLCAAGTPRRPAGRGDTSLSTALCAPGPSLASAKCRSSPPPPWRCPASASHSHSLSTTAPSPFPSCSAATTPRPTRAFSPWRRPSRPHPPEELLHSQATGLVAASQANFMRVIVDATAPGLDHHRGSDLLCVVRALLKKIRRRVLVGDRVLVGAVDWTDRRGMIEDVFERRSEVVDPPVANVDRLVVLFSLDQPKPEPATLTRFLVEAESSGIPFVLVFNKVELVDEQPLSTSKLADLYLSSHSRDA

SEQ ID NO: 80822 - protein, 126 aa, Zea mays
  Coding DNA Sequence Number=SeqID_39043
MNKNTRDTRFIPRFGHTTKVPYFLVEAPTKSRVSFNPNPPFANHKDLKWERQEMCEREWEVFFKLEMEFGSCSSVGRELNFPWTPVELAWTPVEVEVQLDLRKLNSAEVQLELRKLNSAEVQLSCS

SEQ ID NO: 80823 - protein, 100 aa, Zea mays
  Coding DNA Sequence Number=SeqID_39044
MARERRTQTNTMSKNTRDTRFIPRFGHTTKVPYFLVEAPAKSRVSFNPNPPFADHKDLKGERQEVCEREWEVFLRLEMESKSCSYVEERDITVKTNQALV

SEQ ID NO: 80824 - protein, 148 aa, Zea mays
  Coding DNA Sequence Number=SeqID_39045
MVRERRTQTNTMSKNTRDTRFIPRFGHTTKVPYFLVEAPTKSRVSFNPNPPFADHKDLKWERQEMCEREWEVFFKLEMEFGSCSCVGREDRFNRLGQADSQSASQTGRLQVRLQKQVLTPVEPPLGPVQPPGGQTGSQSASQEVRPVS

SEQ ID NO: 80825 - protein, 128 aa, Zea mays
  Coding DNA Sequence Number=SeqID_39046
MNKNTRDTRFIPRFGHTTKVSYFLVEAPTKSQVSFNPNPPFADHKDLKWERQEMCEREWEVFFKLEMEFGSCSYVGREDRLKFSSVREKTLAELFPEPRFNLFRPRLNLPWTPVEPLSTSVQLALDPG

SEQ ID NO: 80826 - protein, 109 aa, Zea mays
  Coding DNA Sequence Number=SeqID_39047
MNKNTRDTRFIPRFGHTTKVPYFLVEAPTKSRISFNPNPPFVDHKDLKWERQEMCEREWEVFFKLEMEFGSCSYVGREVRQTVCQSDYQTDWQTDLQTGQVDQDRLNRP

SEQ ID NO: 80827 - protein, 103 aa, Zea mays
  Coding DNA Sequence Number=SeqID_39048
MVRERRTQTNTMSKNTRDTRFIPRFGHTTKVPYFLVEAPTKSRVSFNPNPPFADHKDLKWERQEVCEREWEVFLRLGMKFYACSPVGKSVGGVYKGAPKAGGR

SEQ ID NO: 80828 - protein, 92 aa, Zea mays
  Coding DNA Sequence Number=SeqID_39049
MSKNTRDTRFIPRFGHTTKVPYFLVEAPTKSRVSFNPNPPFADHKDLKWERQEVCEREWKVFLRLGMKFCACSPVGKSVGGVYKGAPKAGGR

SEQ ID NO: 80829 - protein, 104 aa, Zea mays
  Coding DNA Sequence Number=SeqID_39050
MSKNTRDTRFIPRFGHTTKVPYFLVEAPTKSRVSFNPSPPFADHKDLKWERQEVCEREWEVFLRLGMKFCACSPVGKSVGGVYKGAPKAGGRWGNLTEIRLNRF

SEQ ID NO: 80830 - protein, 107 aa, Zea mays
  Coding DNA Sequence Number=SeqID_39051
MSKNTRDTRFIPRFGHTTKVPYFLVEAPTKSRVSFNPSPPFADHKDLKWERREVCEREWEVFLRLGMKFCACSPVGKSVGGVYKGAPKAGGRWGNLTEIRLTGSKTG

SEQ ID NO: 80831 - protein, 114 aa, Zea mays
  Coding DNA Sequence Number=SeqID_39052
MIKRVKVPEAKVWNPTLSSNKAKRKNLVKARNNIHCKSAFWCPFELKQELQVENEIEVNQVNEMSSCEHRQSKKEQSQETHDFIPWFGQVTLAYFHIVASQWTRVALNPFQVIQ

SEQ ID NO: 80832 - protein, 176 aa, Zea mays
  Coding DNA Sequence Number=SeqID_39053
MDEGCTQPLSSDPMINLNTTELAFGMAYMLVERGNHGDTADARTQSSVEAFHQCHQLHHYAATHEALHRLLYPKHLPAREIDGLDGERPCDYYGPHDFQPDSPEDIPSARSLPHDYFVHVAGDIPDVVDDPPIRACVHFEEGFNVSNSPEFIIEEEPYGVAMAADSDDDHPVCELM

SEQ ID NO: 80833 - protein, 90 aa, Zea mays
  Coding DNA Sequence Number=SeqID_39054
  Subcellular localization annotation: CTP_CleavageSite=60; ConfidenceScore=5.01e-01
MSTLLTGGSQAIMQVACPSAPVAGSTPVLRHTLCSSSLFGDTDDHCGDTNGPHRAAGQVRGRYPKSHIVVPPVAPTREEDEYVITSYGDE

SEQ ID NO: 80834 - protein, 150 aa, Zea mays
  Coding DNA Sequence Number=SeqID_39055
  Gene Ontology: Mol. function=DNA binding
MHNPDLRARFKTSTGGVPVRPGGRQYARAATYTVLIITTPYNYVDIPDSVKGSSGGVVCGQGVTAPPPSSTASPGAMKQWRDDVDRLLGMAHSGSTRSRSRSSRRQHEATTSVRSPSVRGAQTDDLRAELNRSRAGEDARVSLERTRERR

SEQ ID NO: 80835 - protein, 105 aa, Zea mays
  Coding DNA Sequence Number=SeqID_39056
  Gene Ontology: Mol. function=transcription regulator activity; Cellular component=nucleus; Biological process=regulation of transcription
  Homolog annotation: Hit_ID=Q6ZKI8; Match level="QueryCoverage=77%, HitCoverage=32%, E-value=3e-35, Identity=81%"; Hit description=Helix- loop-helix-like protein
MTLYAETQSYFFSDLLPPNDLQYAEKDELRDEKQKLKLENESLEHQMKLMTSTPTYMPHPTLMPVPFPQAPLAPFHAQGQATWQKLMMPFVSYPGYPMWQFMPPS

SEQ ID NO: 80836 - protein, 80 aa, Zea mays
  Coding DNA Sequence Number=SeqID_39057
  Subcellular localization annotation: CTP_CleavageSite=54; ConfidenceScore=5.28e-01
MSVEVGSYVNTNDVFKEPNDVFKEPGSNKRLRSGSNDMHVPTSKASTERLPGRRCSMTSRSTSATLAKFSSTTHTAVDAV

SEQ ID NO: 80837 - protein, 213 aa, Zea mays
  Coding DNA Sequence Number=SeqID_39058
  Gene Ontology: Mol. function=transcription regulator activity; Cellular component=nucleus; Biological process=regulation of transcription
  Homolog annotation: Hit_ID=Q6ZKI8; Match level="QueryCoverage=77%, HitCoverage=73%, E-value=3e-54, Identity=60%"; Hit description=Helix- loop-helix-like protein
MTLDAHYLRGSMAAIYSLLKHASCPESLFFHFMLATQLMEDCVTSPDVNVEVGSYVNTNDVFKEPNDVFKEPGSNKRFLELGSTLEPGKPVKADKVAILSDATLMVIQLRLEAQQLKETNGSLEEKIKELKAKKDELRDEKQKLKLENESLEHQMKLMTSTPTYMPHPTLMPVPFPQAPLAPFHAQGQATWQKLMMPFVSYPGYPMWQFMPPS

SEQ ID NO: 80838 - protein, 213 aa, Zea mays
  Coding DNA Sequence Number=SeqID_39059
  Gene Ontology: Mol. function=transcription regulator activity; Cellular component=nucleus; Biological process=regulation of transcription
  Homolog annotation: Hit_ID=Q6ZKI8; Match level="QueryCoverage=77%, HitCoverage=73%, E-value=1e-63, Identity=67%"; Hit description=Helix- loop-helix-like protein
MTLDAHYLRGSMAAIYSLLKHASCPESLFFHFMPATQLMEDCVTSPDVNVEVGSYVNTNDVFKEPNDVFKEPGSNKRFLELGSTLEPGKPVKADKVAILSDATLMVIQLRSEAQQLKETNGSLEENIKELKAEKDELRDEKQKLKLENESLEHQMKLMTSTPTYMPHPTLMPVPFPQAPLAPFHAQGQATWQKLMMPFVSYPGYPMWQFMPPS

SEQ ID NO: 80839 - protein, 450 aa, Zea mays
  Coding DNA Sequence Number=SeqID_39060
  Homolog annotation: Hit_ID=Q2QXC0; Match level="QueryCoverage=86%, HitCoverage=54%, E-value=2e-18, Identity=24%"; Hit description =Expressed protein
  Pfam annotation: Domain name=DUF1618; Domain location=217-363; Score =38.3; E_value=3.7e-09; Accession=PF07762.4; Description=Protein of unknown function (DUF1618)
QSAPRAMSATSSFTAGESSRAGEQPERDEVVEFLDCPWVALSSAIVVIGANDERARMLAPGASDIFLDLQPPLVGASYLVLPERIVAHYRYSGYQPCVLSACSNCLLFLAIQAEGVSNPAFFLGNARARTVVRLPDVPAHLGVNIIRRQSIGLIADQRHDGHYMVAQLHPTWTTLHKTLLCYSTVTDQWTARPLASAEEHPRWGAHGVLAHGGLLWWIDVSYGMLVCDPFAADDNLHLRFIPLPVGSMLMAQPELMAHGLRFISRSGLMAHQRFIRPSQGKLRYVEIQGAPSGMLTTNYQPPSNPQVRMFTLVSQEGQHHWVHEYTATFLDIWSYRSYADAGLPRGVVPSLALIDPNNANIIYFFQGTTLFAVDRYARKVLHHLQYLVDVVDSTYADLTLQNSRYVSAWELPPGVFVNGHGPNGTAEVAGGAWISLSGGTPSGGEILGDV

SEQ ID NO: 80840 - protein, 442 aa, Zea mays
  Coding DNA Sequence Number=SeqID_39061
  Homolog annotation: Hit_ID=Q2QXC0; Match level="QueryCoverage=88%, HitCoverage=54%, E-value=2e-18, Identity=24%"; Hit description =Expressed protein
  Pfam annotation: Domain name=DUF1618; Domain location=211-357; Score =38.3; E_value=3.7e-09; Accession=PF07762.4; Description=Protein of unknown function (DUF1618)
MSATSSFTAGESSRAGEQPERDEVVEFLDCPWVALSSAIVVIGANDERARMLAPGASDIFLDLQPPLVGASYLVLPERIVAHYRYSGYQPCVLSACSNCLLFLAIQAEGVSNPAFFLGNARARTVVRLPDVPAHLGVNIIRRQSIGLIADQRHDGHYMVAQLHPTWTTLHKTLLCYSTVTDQWTARPLASAEEHPRWGAHGVLAHGGLLWWIDVSYGMLVCDPFAADDNLHLRFIPLPVGSMLMAQPELMAHGLRFISRSGLMAHQRFIRPSQGKLRYVEIQGAPSGMLTTNYQPPSNPQVRMFTLVSQEGQHHWVHEYTATFLDIWSYRSYADAGLPRGVVPSLALIDPNNANIIYFFQGTTLFAVDRYARKVLHHLQYLVDVVDSTYADLTLQNSRYVSAWELPPGVFVNGHGPNGTYTVGIKLVIGNVFRAHNTGAQGA

SEQ ID NO: 80841 - protein, 83 aa, Zea mays
  Coding DNA Sequence Number=SeqID_39062
MVSHSGYGGYKCGHCTTAVGVSEALYAKATQLVLLANQTPQPYSCMSRGSLEDMVAGVTWPSILPPGWIVEWDPTSAEEEHEE

SEQ ID NO: 80842 - protein, 67 aa, Zea mays
  Coding DNA Sequence Number=SeqID_39063
MTVGVSEALYAKATQLVLLANQTLQPNSCMSRGSLEDMVAGVTWPSILPPGWTVEWDPASAEEEHEE

SEQ ID NO: 80843 - protein, 76 aa, Zea mays
  Coding DNA Sequence Number=SeqID_39064
MRWLGFGGRGALRWVGHACAPAEGGRWASARSGGKGAGWASWATGARGMVVFPYQGETTLRPLKGKGNDKTCRIGA

SEQ ID NO: 80844 - protein, 133 aa, Zea mays
  Coding DNA Sequence Number=SeqID_39065
  Subcellular localization annotation: CTP_CleavageSite=49; ConfidenceScore=5.06e-01
MAGSTAGGADGGGVCSPESGLSDAQQHHARACRSREGSARHRPGQGSCRVAARARMGARRASCVGHARPHRRGAGPAALPGCYKSNPLNRNLAPELQEDASKKNKMVVFPYKGETTLRPLKGKGNNKTCRIGT

SEQ ID NO: 80845 - protein, 128 aa, Zea mays
  Coding DNA Sequence Number=SeqID_39066
MGDKLHRREGNSPDHQLRPLNDRSVIKEVGVQRQPGGERSALEGSKRESGGRRSGSENVGLSNENIGENPMPRKPKVSSASLGGRRRRPPSGGARAISEIPLWKSSDSNLVSDPRAKGQSQVDSFYGA

SEQ ID NO: 80846 - protein, 188 aa, Zea mays
  Coding DNA Sequence Number=SeqID_39067
  Homolog annotation: Hit_ID=P56773; Match level="QueryCoverage=27%, HitCoverage=33%, E-value=4e-17, Identity=92%"; Hit description =Cytochrome b6
MVSKYDGSNDDPARVVLAVLTASFGVTGYSLPWDQIGYWAVKIVTGVPEAIPGSRSASETMGDKLHRREGNSPDHQLRPLNDRSVIKEVGVQRQPGGERSALEGSKRESGGRRSGSENVGLSNENIGENPMPRKPKVSSASLGGRRRRPPSGGARAISEIPLWKSSDSNLVSDPRAKGQSQVDSFYGA

SEQ ID NO: 80847 - protein, 148 aa, Zea mays
  Coding DNA Sequence Number=SeqID_39068
MNRRSDQTNRKHDDDALVELVTVMFWVATEDERAETDSSPELSLEFGRESNFDELIMEAYGSYCRRFETGGSLRPTSECRVPQPRWVERVGEREGGKGARRPETGVREVGIPRPSCLSRAQVGRKERIQVYNGGVAKCYVSSGGELAP

SEQ ID NO: 80848 - protein, 86 aa, Zea mays
  Coding DNA Sequence Number=SeqID_39069
MNRRSDQTNRKHDDDALVELVTVMFWVATEDERAETDSSPELSLEFGRESNFDELIMEAYGCWEVGGYMIDLIWYLSVTILSYPIY

SEQ ID NO: 80849 - protein, 165 aa, Zea mays
  Coding DNA Sequence Number=SeqID_39070
MSSECKLVEDEVLVDPEVFEVDDPDGSCLGATFIHLNKHLSILPGTRPWDEVRMPAAWSSRDEGKTPAAWSSRDEGKTPAAWSSRDEGRDAGRLELAGRGEDAGARDKGMDAGAQDEGRDAAADGGRGKRGGRRRGMRGGHRRRTTAQDDGAGRGLPNAGRGEKR

SEQ ID NO: 80850 - protein, 144 aa, Zea mays
  Coding DNA Sequence Number=SeqID_39071
  Subcellular localization annotation: CTP_CleavageSite=42; ConfidenceScore=5.42e-01
MSSESSSDTSGSSTSKTSGSTSTSSSTSLHSEDIVEKGSCTSARHRTKRGHAKCKKLEKGGPRRLTFDKNGIAQSPVKHVNEFSSYCGYIARMRVDIRIKDWRKVPTVVKSNLWEDVSKKFVMPRDETHTLNVKKVALKSMSKD

SEQ ID NO: 80851 - protein, 561 aa, Zea mays
  Coding DNA Sequence Number=SeqID_39072
  Homolog annotation: Hit_ID=Q5NAR7; Match level="QueryCoverage=29%, HitCoverage=12%, E-value=1e-76, Identity=87%"; Hit description =Putative FUSED serine/threonine kinase
  Subcellular localization annotation: CTP_CleavageSite=42; ConfidenceScore=5.42e-01
MSSESSSDTSGSSTSKTSGSTSTSSSTSLHSEDIVEKGSCTSARHRTKRGHAKCKKLEKGGPRRLTFDKNGIAQSPVKHVNEFSSYCGYIARMRVDIRIKDWRKVPTVVKSNLWEDVSKKFVMPRDETHTLNVKKVALKSMIVMSGHVAPPKSSNFFVEFGMDSGYHKKYTSSSSKVQGILFTYTFVQHMLYRILQVAGTVTKAMGARYCIIPIPTSSQNSTISLFRILPKTSLANLRMELLGIRRFSQGCGTSPSSPSGRMLLFNVLRAMHKRELDEKVRDALHLYIEARGINEKLFRFLQAWLHVKDHRNLVRWFKSVGSFISDQSQSKMTNTVTSMNQYILSLSDDKQLVPGLISLIEQGTDVLRVKPLLFVALLCKNSRRWLPHFFCNAKLISAVDRLGKEKEGFIHHCTEAFVQLVASLVPGILDTVSSDIQQVMVGKRHGPVTALAGRAHPKSTIHLFPVILHLLGSASFKHRVVTGHVLLQLANLIKILEAPFQVLFKNLTVDIKDVKPTSLLKDRLREVEGNPKLGSLGPQLQYSKYASKFLKGLLYFISYLI

SEQ ID NO: 80852 - protein, 333 aa, Zea mays
  Coding DNA Sequence Number=SeqID_39073
  Gene Ontology: Mol. function=protein serine/threonine kinase activity; Biological process=protein amino acid phosphorylation
  Homolog annotation: Hit_ID=Q5NAR7; Match level="QueryCoverage=49%, HitCoverage=12%, E-value=6e-77, Identity=87%"; Hit description =Putative FUSED serine/threonine kinase
  Subcellular localization annotation: CTP_CleavageSite=51; ConfidenceScore=5.07e-01
MGPLLLSFRILPKTSLANLRMELLGIRRFSQGCGTSPSSPSGRMLLFNVLRAMHKRELDEKVRDALHLYIEARGINEKLFRFLQAWLHVKDHRNLVRWFKSVGSFISDQSQSKMTNTVTSMNQYILSLSDDKQLVPGLISLIEQGTDVLRVKPLLFVALLCKNSRRWLPHFFCNAKLISAVDRLGKEKEGFIHHCTEAFVQLVASLVPGILDTVSSDIQQVMVGKRHGPVTALAGRAHPKSTIHLFPVILHLLGSASFKHRVVTGHVLLQLANLIKILEAPFQVLFKNLTVDIKDVKPTSLLKDRLREVEGNPKLGSLGPQLQYSKNYGFGFG

SEQ ID NO: 80853 - protein, 79 aa, Zea mays
  Coding DNA Sequence Number=SeqID_39074
MRVAVHAVLIGGDRFFGNVQTSDNPAGAPESLDKFGICFSYLPKSVSPVMQTLQASEQVLPDLRKDSQGYAGFKGVKVK

SEQ ID NO: 80854 - protein, 156 aa, Zea mays
  Coding DNA Sequence Number=SeqID_39075
MASASVGGTRGGFGVASLPREAADVISQFIDSVAIRDPYVSPASEFCLKLINFHFKIPDRIITPTTAILVSWGKLMTWHTNWAKMGFALIPAVTEPPKSLGPPTVVLVQWTSDNPVGAPESLDKFGICFSYLSQERFTRHADITDHRRYENAEAIT

SEQ ID NO: 80855 - protein, 227 aa, Zea mays
  Coding DNA Sequence Number=SeqID_39076
MECCYQVLIRSYQATVVKCNQQVEPVKDWMSDCVEKQKPARRRNMWSSGCKGQMELAEWQYRKYCTSDAKKALVGITGEKTLDKLTDQPGNLIPIDVAEVPDLSGGDARSRGHLLMLVDVSLDLAYRWEASNCSSESPLPRQSPPTVDVCLRAIIASKKSSYVFTFAFSSRRTRGIRVCVARVWGREIRPWSAAAQGAHSVVVWTDRGDVCSPLDVQPRAGIDSGSY

SEQ ID NO: 80856 - protein, 201 aa, Zea mays
  Coding DNA Sequence Number=SeqID_39077
MECCYQVLIRSYQATVVKCNQQVEPVKDWMSDCVEKQKPARRRNMWSSGCKGQMELAEWQYRKYCTSDAKKALVGITGEKTLDKLTDQPGNLIPIDVAEVPDLSGGDARSRGHLLMLVDVSLDLAYRWEASNCSSESPLPRQSPPTVDVCLRAIIASKKSSYVFTFAFSSRRTRGIRVCVAVCGGGRSGHGAPPLRVLTLS

SEQ ID NO: 80857 - protein, 119 aa, Zea mays
  Coding DNA Sequence Number=SeqID_39078
  Gene Ontology: Mol. function=nucleic acid binding
MAGSGESPAMEGDDVRLDPETEGGVDGNSLVTPPPALLGPVIAEMSIGEEGEQRVRPPMSNISSREMDTPQILHSHGKNIDPTIVPTVGMTFKDVDDAYKFYKRSIVCSSFKILHASSS

SEQ ID NO: 80858 - protein, 208 aa, Zea mays
  Coding DNA Sequence Number=SeqID_39079
  Gene Ontology: Mol. function=nucleic acid binding; Biological process= metabolic process
  Homolog annotation: Hit_ID=Q6AU28; Match level="QueryCoverage=71%, HitCoverage=27%, E-value=5e-20, Identity=29%"; Hit description =Putative FAR1 protein
MAGSGESPAMEGDDVRLDPETEGGVDGNSLVTPPPALLGPVIAEMSIGEEGEQRVRPPMSNISSREMDTPQILHSHGKNIDPTIVPTVGMTFKDVDDAYKFYKRYAYEVGFPLKKYREKTFSKWINCSREAAKIELVNLEHNHEFITDEAEKQHLCCNKIRDAEFINFVDAMHDSRVPQHCIVDFISEMHDGPENVPEGSQEKRKLRK

SEQ ID NO: 80859 - protein, 80 aa, Zea mays
  Coding DNA Sequence Number=SeqID_39080
MSTIKDGAKARIVTDRGENATKVKIGKTSFSNQNRKDDISKGRHRNWQGVKEEGAVNDEIDEALSPNRDGKEEAQRGRFN

SEQ ID NO: 80860 - protein, 121 aa, Zea mays
  Coding DNA Sequence Number=SeqID_39081
MQDGRMSIIKDEAEVRIVTGKGENASKFRIGVKEEGAVNDKIDEALSSNRDGKEEASKGRFKVKMIIMKSITKDSVKIRLAKWQSGENNKGGTRTKINYKCTFGLKERKYKCGAKVNAKSA

SEQ ID NO: 80861 - protein, 236 aa, Zea mays
  Coding DNA Sequence Number=SeqID_39082
  Homolog annotation: Hit_ID=Q6QP54; Match level="QueryCoverage=18%, HitCoverage=15%, E-value=1e-12, Identity=88%"; Hit description =Putative kinase
MEDRLDLGFGGASTSPDLGHRPATSTGSAIITLPRADSGRREQDRSLTEAGGRQQGLNRSDSCPSARLRRSSDSHDITPAGCQDLSGCHLGMAFLEKVGRAGTRTRQALSWGRSLPSPAWTLVTPYCKRTRPGRGTNTKAAGFPPLSRPSPATSLPPFALAHALDPSGLGHAAHSLVGLGTPRSRDADSIEKVEDATTNRTSSMQDLGKLETDEQKEVTYYDAYPVVRGLLRGAGW

SEQ ID NO: 80862 - protein, 372 aa, Zea mays
  Coding DNA Sequence Number=SeqID_39083
  Homolog annotation: Hit_ID=Q6QP54; Match level="QueryCoverage=18%, HitCoverage=24%, E-value=1e-14, Identity=82%"; Hit description =Putative kinase
MQPRKAGPLAKKCDESLQASANTPFEARGLLSGTIIRGTLKTPNSQLQSRSDRRHFAAPLTGLTEGQCRLRHSDCSATRQSETDRQSGLAKGLGLRLSPQKTTNSASPDPRARTLPWPLPNNLRLARPRGSASASAMEDRLDLGFGGASTSPDLGHRPATSTGSAIITLPRADSGRREQDRSLTEAGGRQQGLNRSDSCPSARLRRSSDSHDITPAGCQDLSGCHLGMAFLEKVGRAGTRTRQALSWGRSLPSPAWTLVTPYCKRTRPGRGTNTKAAGFPPLSRPSPATSLPPFALAHALDPSGLGHAAHSLVGLGTPRSRDADSIEKVEDATTNRTSSMQDLGKLETDEQKEVTYYDAYPVVRGLLRGAGW

SEQ ID NO: 80863 - protein, 154 aa, Zea mays
  Coding DNA Sequence Number=SeqID_39084
MTGDKQRQKLKQKPSSKISNTYIKKVNKKDATPYLIKKKKNGKVIAIKANKQANKGKEAKHIWVPKEIISTMKSTKKVWIPKGNLLPSGLVKILDPNFPPMTKICVCIYLLSSLPFLPSITFVMYFCSKSCILVHRMRRELDQGNEDATPQKKT

SEQ ID NO: 80864 - protein, 154 aa, Zea mays
  Coding DNA Sequence Number=SeqID_39085
MTGDKQRQKLKQKPSSKISNTYIKKVNKKDATPYLIKKKKNGKVIAIKANKQANKGKEAKRIWVPKEIISTMKSTKKVWIPKGNLLPSGLVKILDPNFPPMTKICVSIYLLSSLPFLPSITFVMYFCLKSCILVHRMRRELDQGNEDATPQKKT

SEQ ID NO: 80865 - protein, 115 aa, Zea mays
  Coding DNA Sequence Number=SeqID_39086
MAEATQFAHTMSRLLNQLVQNEIRKMANTEVVSPTDSTWLTRGRLRREPATITDPNYGSPAAQTSRWSCGRLFFPFSLLTVMAAYGMRVDELHPLSQSAHATSRRRRPAPAFLAV

SEQ ID NO: 80866 - protein, 91 aa, Zea mays
  Coding DNA Sequence Number=SeqID_39087
MAEATQFAHTMSRLLNQLVQNEIRKMANTEVRTLPRIRSPEGPPTAHGGGLRVNDDNNEQSEVPECVVRDLPEQQPGEGKCPLTYYVLHTL

SEQ ID NO: 80867 - protein, 205 aa, Zea mays
  Coding DNA Sequence Number=SeqID_39088
  Gene Ontology: Mol. function=DNA binding
MMVWIIEHHAETSEDFVMEQEVASSAPRVPDRPDSGTADRVATPPPSSTTSPGAMKQWRDDVDRLLGMAYSTSTRSRPRSSRRQHEAMASVRSPSVRGAQTDDLRAELNCRRTGEDARVSLERARECRQNINGRDLDQYFAAVAPQTPMGTRSPTGVPLVGVGCAALADHLRAASLKGKCALGPFLSILVIECQLKCLNVNLCNG

SEQ ID NO: 80868 - protein, 178 aa, Zea mays
  Coding DNA Sequence Number=SeqID_39089
  Gene Ontology: Mol. function=DNA binding
MVWIIEHHAETSEDFVMEQEVASSAPRVPDRPDSGTADRVATPPPSSTTSPGAMKQWRDDVDRLLGMAYSTSTRSRPRSSRRQHEAMASVRSPSVRGAQTDDLRAELNCRRTGEDARVSLERARECRQNINGRDLDQYFAAVAPQTPMGTRSPTGVPLVGVGCAALADHLRAASLKGK

SEQ ID NO: 80869 - protein, 120 aa, Zea mays
  Coding DNA Sequence Number=SeqID_39090
  Homolog annotation: Hit_ID=Q93ZR8; Match level="QueryCoverage=22%, HitCoverage=5%, E-value=4e-09, Identity=92%"; Hit description =Putative auxin-independent growth promoter
YAYPWWKEKVIDSDLKRKDGLCPLTPELKECNSLYEGYVPMKYKHYCKKMKKYGYYYINFVASIIEVPEFVIFLAVVLLKIIFSSIGLYDCFLVTTFTLISIAMNGHFVISFEYVNIQYE

SEQ ID NO: 80870 - protein, 160 aa, Zea mays
  Coding DNA Sequence Number=SeqID_39091
  Homolog annotation: Hit_ID=Q93ZR8; Match level="QueryCoverage=19%, HitCoverage=6%, E-value=1e-09, Identity=80%"; Hit description =Putative auxin-independent growth promoter
MPNMTNRDVARIVGGIDTDGTPIIAGIAKFMDILITRLVTSPLSCNTKLQYAYPWWKEKVIDSDLKRKDGLCPLAPELKECNSLYEGYVPMKYKHYCKKMKKYGYYYINFAASIIEIPEFVIFLTVVLLKIIFSRYGEWGDHVTLQAAADKINSLFMLCF

SEQ ID NO: 80871 - protein, 52 aa, Zea mays
  Coding DNA Sequence Number=SeqID_39092
MRLTVLGIDSGNGSFPAGESCGALLGLVLAVGLGPDPGFPPAFDEGVLVLVL

SEQ ID NO: 80872 - protein, 465 aa, Zea mays
  Coding DNA Sequence Number=SeqID_39093
  Subcellular localization annotation: CTP_CleavageSite=29; ConfidenceScore=5.18e-01
MAPHLVADLAKKGSMTVRWPRLNGTSEMSTARGRGFPHQTQMGTQGRDLVLRQVPNQEGLRNSPPAGKDPSSLDKSSLHPRGPGTKEESVTPRATGTSGTNYLHTSRATWVASSERLASGGDHLYTNGSDHLCTDGSPAATTTSAPSGSPAEATTSATSSLTSGDDHLNVRAMAKRSSPSSPYGGEDKTIQAMELGARRKAVLAAVYHFEHSLSLGVLGMKSQGHGKLQQREAETLKTKGHRELGGERTPRVGEKQGMSATRGMNPSLKADSPAPASKHRAKPPPMHTGVIQLAHWPSSAKKANCRTGSMLPPHGSTPPSSSLRPTVKKANRRTRSMLPPRGKKSHRRSRQYRVSSGPLQKMEKINFQNQCSDSRHPAYGPTKTLSAEVTDQSAAGTGVAAGVTTGGPAVIASTGAQKQRANQSNFAPTCRLVSSLEAASGPLSTPWIRGTSFYSMKARCPYGGP

SEQ ID NO: 80873 - protein, 122 aa, Zea mays
  Coding DNA Sequence Number=SeqID_39094
MGKDKKGHGSLRRSGDKRKREPSPSSEDFDDFQGIAAEVWTYIRSVERAGLEGSDESEVSSDEEKSSDSSEEGGGGDSDDEGDNGDGGGGGDDNDDGGKGDIGDNEKGGSSSSKASGKTPLA

SEQ ID NO: 80874 - protein, 202 aa, Zea mays
  Coding DNA Sequence Number=SeqID_39095
MWVTLETPRATLARVCSFPASAHSASSSPLAHEGMALRDRIGTLSSTYALEISVLSFGVKVPLDAAEPWARTRKVRARRVAPATNGSVNRVPRRRTSGSLVYASPPASFDDSDDSQGIAAEVWTYIRSIDRAGLEGSDESEVSSDEDNSSDSSKEGNDSDEGNDGDGGDSGDSGDDCSKGGGGDGSGKGGDDGKGSGKVPLA

SEQ ID NO: 80875 - protein, 72 aa, Zea mays
  Coding DNA Sequence Number=SeqID_39096
  Subcellular localization annotation: CTP_CleavageSite=30; ConfidenceScore=5.35e-01
MGMDMGQNLHSLGKRGYPDAPLSPPTYVRPAMKRQQSYSTTPSGSEPKFSNQSSTLSTDLNRLDSSLKNVKF

SEQ ID NO: 80876 - protein, 186 aa, Zea mays
  Coding DNA Sequence Number=SeqID_39097
MVGGGAHGGTTYKGYTIPHNKRWHTVAGKGLCAVMCRTGYWRRRLWAPAAAAMGTGGGYGPAEAAMDWALSALSTVNKQINSLSALSRTGHWELWAEGLRHPWDGHDDHSHGHGHGNEKTKNHLLTLIHRAIPVLFKRNKETRDVNGDPIPANPWGIPLLGYGYETKIVPMGMDMGQNLHSLGKRV

SEQ ID NO: 80877 - protein, 192 aa, Zea mays
  Coding DNA Sequence Number=SeqID_39098
  Subcellular localization annotation: CTP_CleavageSite=42; ConfidenceScore=5.06e-01
MRLGFPFIAPRQLGAVGGILGRQFLPSVGWRTRQSGAPPDSHCSMSGADLLPFLAQPTVGSSGCSAFFALAVDWRVRTRARHRVSQPRRPPTRPAPFLEPRQCPTLTPRLISHTLALSHALPSPPDAAGDPSPCSRPSNSPETAPSLPKLRLKVRHSSPCPIFLIVPSVRPISPSPVLDHGGPPCSRSGRPI

SEQ ID NO: 80878 - protein, 169 aa, Zea mays
  Coding DNA Sequence Number=SeqID_39099
MAEIRSAAEGAHGRALTSGTGSAGNDERLRVALTDRGNRRLRAAPLLSAAVRSPELRQARARVALGSPDLGRGEEGATTNSMAGKRPQIHGQRGENDGEKVSGGPEKLRTAIPATGRGLKALANFSRGRGDTGNYSSELDRAKSVGHCASTADRRGRTPAKAKLDEHRA

SEQ ID NO: 80879 - protein, 165 aa, Zea mays
  Coding DNA Sequence Number=SeqID_39100
  Gene Ontology: Mol. function=nucleic acid binding; Cellular component= spliceosome; Biological process=mRNA processing
  Homolog annotation: Hit_ID=Q10M01; Match level="QueryCoverage=51%, HitCoverage=11%, E-value=4e-29, Identity=74%"; Hit description=Zinc finger C-x8-C-x5-C-x3-H type family protein, expressed
  Subcellular localization annotation: CTP_CleavageSite=39; ConfidenceScore=5.19e-01
MATLRKGAIFTQRLPRHQIKGCILSPVSPFPFYSLRVAVCSRATVGMLLGVEDMHRFPDVRIPYQQKRMFGFVTFVYAETVKVILSKGNPHFVCDARVLVKPYKEKGKVPGRFRKLQHTHHGGAEFVGCASPTGLLDSRDPYALLLLSGAQNFSRFSPGHEAIGL

SEQ ID NO: 80880 - protein, 354 aa, Zea mays
  Coding DNA Sequence Number=SeqID_39101
  Gene Ontology: Mol. function=monooxygenase activity; Cellular component=integral to membrane; Biological process=electron transport
  Homolog annotation: Hit_ID=Q0Z7U8; Match level="QueryCoverage=60%, HitCoverage=41%, E-value=1e-114, Identity=94%"; Hit description =Flavonoid 3'-hydroxylase
  Pfam annotation: Domain name=p450; Domain location=4-342; Score=40.9; E_value=7.7e-13; Accession=PF00067.12; Description=Cytochrome P450
MATLRATVGMLLGRRGHAQVPGALPVDGPRRPHPQSRRATDRVQLLQDVRIPYQQKRMFGFVTFVYAETVKVILSKGNPHFVCDARVLVKPYKEKGKVPGRFRKLQHTHHGGAEFVGCASPTGLLDSRDPYALLLLSGAQNLFTAGTDTTSSTVEWALAELIRHPDVLRKAQQELDAVVGRDRLVSESDLPRLTYLTAVIKETFRLHPSTPLSLPRVAAEECEVDGFRIPAGTTLLVNVWAIARDPEAWPEPLQFRPARFLPGGSHAGVDVKGSDFELIPFGAGRRICAGLSWGLRMVTLMTATLVHALEWDLADGVTAEKLDMEEAYGLTLQRAVPLMVRPAPRLLPSAYAAQ

SEQ ID NO: 80881 - protein, 127 aa, Zea mays
  Coding DNA Sequence Number=SeqID_39102
  Homolog annotation: Hit_ID=P59833; Match level="QueryCoverage=33%, HitCoverage=21%, E-value=9e-07, Identity=58%"; Hit description =Putative GPI-anchored protein At5g19250 precursor
MELRDNMGAMYLGEIDNDWKIFGQLGVLELGLIQIDKGKQTAPGMKNTDRPKSMASLNGRVGALLPLELPRELLGQARRVLVLGQRRDLERGHVAVDALEELRHCLKRGGVRSISYQNSARFRSQKA

SEQ ID NO: 80882 - protein, 418 aa, Zea mays
  Coding DNA Sequence Number=SeqID_39103
  Homolog annotation: Hit_ID=Q8H096; Match level="QueryCoverage=15%, HitCoverage=18%, E-value=5e-18, Identity=70%"; Hit description =Expressed protein
  Pfam annotation: Domain name=Per1; Domain location=12-218; Score= -102.4; E_value=3.3e-05; Accession=PF04080.3; Description=Per1-like
MAAAAATPPIPAPNPTDVWVGGSWTVDCSCGVTFDDGEEMISYEQFWRYTRLADPTMEATLLQRVRIFTTADPSSNNLEVVILYDFKCDTIWTEKLYFSSDAAFLGYSLILTILRTSSLRDEASRVMVAAPILAFVTTHIMYLNFYELDKGRRKDLNILKQAFISYQLVASASTMHISLSAEFDYSVGPTILCPWMRFFPLEFSGTTVMLCFLEKMSFISVGLLNKCHFHTTLDLTTYHKNGQSGLNQQPYLSYQAMTQLLKGINSYRSSLKVPALSENKNTACLAEQLARQFKGHECTNTFLDATIFAFWTKTSVDIEPKRIRLKSSSYTSNTMLDTVTAATVQMISSASGTKASGSDIGALIEVVTLLYGSKHATKRRLDMLEKKALECSEPTVPSSKQVFDEMSARAWQVFEMAS

SEQ ID NO: 80883 - protein, 173 aa, Zea mays
  Coding DNA Sequence Number=SeqID_39104
MAIRIDYTQLRISNHTTYVALNPCICQPATGVLKTRSGSRKPRAQIHHRPASCHGGVSRKVIKFKEGNAGIVLSSNSYHLMQQASEKHFKNIKGGGKCTGACLRSHIPEAAAVNFEQDARRPKVEKNTGRGEYVSRGVAVVPAINGEQGKVVELQSIYNFATMCSHKKSLDLA

SEQ ID NO: 80884 - protein, 147 aa, Zea mays
  Coding DNA Sequence Number=SeqID_39105
VSRKVIKFKEGNARIVLSSNSYHLMQQASEKDFKNIKGGGKCTGACLRSQKDPYGSISLHDEVPDGAPNRGPSSGELDWPEGVRTGAPEWRTPNLTYPKHFPQVNCIVGELSSSVRVNRMGGGQMSVFPVTRGFLAQLRGSASIVEL

SEQ ID NO: 80885 - protein, 96 aa, Zea mays
  Coding DNA Sequence Number=SeqID_39106
  Gene Ontology: Mol. function=protein phosphatase type 2C activity
  Homolog annotation: Hit_ID=Q2HW33; Match level="QueryCoverage=95%, HitCoverage=34%, E-value=1e-09, Identity=34%"; Hit description =Protein phosphatase 2C-like
MYDKLRRSRRLDAVQSGCSALSIVKQGDLMVVANVGDSWVVLGTAFDDDAITSSSSSSTSSPTCHPSQKSSVLGMSRTFDDYYIEDCGVILAPEVT

SEQ ID NO: 80886 - protein, 121 aa, Zea mays
  Coding DNA Sequence Number=SeqID_39107
  Gene Ontology: Mol. function=protein phosphatase type 2C activity
  Homolog annotation: Hit_ID=Q8LD08; Match level="QueryCoverage=88%, HitCoverage=36%, E-value=4e-09, Identity=30%"; Hit description =Protein phosphatase-like
MYDKLRCSRRLDAVQSGCSALSIVKQGDLMVVANVDDSWVVLGTAFDDDAITSSSSSSTSSPTCHPSQESSVLGMSRTFDDYYIEDCGVILALEVTQGRTDNNDQFVILATVEVAFVPTCL

SEQ ID NO: 80887 - protein, 121 aa, Zea mays
  Coding DNA Sequence Number=SeqID_39108
  Gene Ontology: Mol. function=protein phosphatase type 2C activity
  Homolog annotation: Hit_ID=Q8LD08; Match level="QueryCoverage=88%, HitCoverage=36%, E-value=2e-09, Identity=30%"; Hit description =Protein phosphatase-like
MYDKLRRSRRLDAVQSGCSALSIVKQGDLMVVANVDDSWVVLGTAFDDDAITSSSSSSTSSPTCHPSQESSVLGMSRTFDDYYIEDCGVILALEVTQGRTDNNDQFVILATVEVASVPTCL

SEQ ID NO: 80888 - protein, 92 aa, Zea mays
  Coding DNA Sequence Number=SeqID_39109
MVVANVDDSWVVLGTAFDEDAITSSSSSSTSSPTCHPSQESSVLGMSRTFDDYYIEDCGVILALEVTQGRTDNNDQFVILATVEVASVPTCL

SEQ ID NO: 80889 - protein, 168 aa, Zea mays
  Coding DNA Sequence Number=SeqID_39110
MARCLVVLTLVPISSLLVALTVLLVLLLRELPLILLLVLTLMLMLVTLLELLRFGKCGSSAGSEGGQPNLSETSFRHMVTIEVVPELLTGDGFRVSMGGEALVASELASGVEVGVATAAPAALLLKFGQSLGLLEFASGTSAQWSSGVAVATAAELPPPGVPAAPAVF

SEQ ID NO: 80890 - protein, 93 aa, Zea mays
  Coding DNA Sequence Number=SeqID_39111
MTDDGLDLKYYPRRSTSSAGGVIVSLVGEGNPRLNIMVNLVAMLNTELDHVLDELGKMSENRRRGGRRAQQEKQAPPGGGSPAAVATATPDDH

SEQ ID NO: 80891 - protein, 51 aa, Zea mays
  Coding DNA Sequence Number=SeqID_39112
MKSWGITSFTVGDRLDPVPRLLSLSYRRRALTFEEAVGGRVQRGFVGLEGI

SEQ ID NO: 80892 - protein, 69 aa, Zea mays
  Coding DNA Sequence Number=SeqID_39113
MGNERDTLRERLWRGVGLNEVVGITSFTVGDRHDPVPRLLSLSYRRRTLTFEEAVVRSGQQGVGVAGGL

SEQ ID NO: 80893 - protein, 69 aa, Zea mays
  Coding DNA Sequence Number=SeqID_39114
MGNERDTLPERLWRGVGLNEVVGITSFTVGDRRDPVPRLLSLSYRRRTLTFEEAVVRSGQQGVGVAGGL

SEQ ID NO: 80894 - protein, 69 aa, Zea mays
  Coding DNA Sequence Number=SeqID_39115
MGNERDTLPERLWRGVGLNEVVGITSFTVGDRLDPIPRLLSLSYRRRALTFEEVVVRSGQQGVGVAGGL

SEQ ID NO: 80895 - protein, 57 aa, Zea mays
  Coding DNA Sequence Number=SeqID_39116
MTEAQAGAMFYGDGGGFLTFRFNSDDAGASDVIVDITPQPITLNQRSKSNKYHNNKH

SEQ ID NO: 80896 - protein, 193 aa, Zea mays
  Coding DNA Sequence Number=SeqID_39117
MTEAQAGAMFYGDGGGFLTFRFNSDDAGASVAAHEPTGSELRGSAAVVTTVVRYARREEESGAPDLVTSAQMAEPRAPGRSRGCYGECRAWGFGLAFPVGPRVPGYWPRMVVSAQGQPDEDAESKVSAEWGASKTIVHLQDELRAGEAEEAEQMGIHGRSGWGFWLHETDQGVGSDSWWADRMVEIAERYKRV

SEQ ID NO: 80897 - protein, 79 aa, Zea mays
  Coding DNA Sequence Number=SeqID_39118
MALIGFAQLDTNNKYIFLTQVHKETWVGLAVKLWGSISCAGVTSKLWRNRPNYSSLSAQVAPIRAATHLNRNNPSVPRI

SEQ ID NO: 80898 - protein, 108 aa, Zea mays
  Coding DNA Sequence Number=SeqID_39119
MSEREEEIEVTEEETPPPSESQAGNHFYFDICGSEPDSPVNEGKPRRADRGPFNWSHASSWHPLESLFLSLVRKRQTFVASAPRWYQMRKKKTEVREDSVLHLGSFVY

SEQ ID NO: 80899 - protein, 149 aa, Zea mays
  Coding DNA Sequence Number=SeqID_39120
MAKLKMDYRSINLMQRIESVTTANLEKIQVEHRLSGALIDGPHEREEEIEVTEEETPPPSESQAGNHFYFDICGSEPDSPVNEGKPRRADRGPFNWSHASSWHPLESLFLSLVRKRQTFVASAPRWYQMRKKKTEVREDSVLHLGSFVY

SEQ ID NO: 80900 - protein, 234 aa, Zea mays
  Coding DNA Sequence Number=SeqID_39121
  Subcellular localization annotation: CTP_CleavageSite=30; ConfidenceScore=5.31e-01
MSSRSLMHRVFPPSKPPDGGYPPSFRLIVGGTQLRGSWYLSAIIRLQGFSSASPTVPPRRWSPKTVTTSSWVGRSKPGCDLGPTLSFKDVHHPRWGGGRAEPALYLPRGFVGHPLPRRSRERALTGPAGGPDFENAGLVDGRRRHLQRVGLVGLAPGGPFCRRAAAAPYSPVDYLNRFTKHESPRVKVTSESGDPWTASPSEARSDLAEGVVDAEGATAPFQRQDPSLQDQSVL

SEQ ID NO: 80901 - protein, 235 aa, Zea mays
  Coding DNA Sequence Number=SeqID_39122
  Subcellular localization annotation: CTP_CleavageSite=30; ConfidenceScore=5.22e-01
MSSRSLMHRVFPPSKPPDGGYPPSFRLIVGGTQLRGSWYLSAIIRLQGFSSASPTVPPRRVVTQDGDHQFLGGEKQAGLRSWSHPQLQGCSSSSLGVGGRAEPALYLPRGFVGHPLPRRSRERALTGPAGGPDFENAGLVDGRRRHLQRVGLVGLAPGGPFCRRAAAAPYSPVDYLNRFTKHESPRVKVTSESGDPWTASPSEARSDLAEGVVDAEGATAPFQRQDPSLQDQSVL

SEQ ID NO: 80902 - protein, 75 aa, Zea mays
  Coding DNA Sequence Number=SeqID_39123
MQLNYISFDFVFGLQGLVDMNKPPEMISGNMKVGSANSFERKRPGKGTLGQAFGVLVHSSRALAEPEAITPGVLG

SEQ ID NO: 80903 - protein, 84 aa, Zea mays
  Coding DNA Sequence Number=SeqID_39124
MNKPPEMISGNMKVGSANSFERKRPGKGTLGQAFGVLVHSSRALAEPEAATPGGKLDLVVGRQPQIEHVIPHIHKSLINKSSKE

SEQ ID NO: 80904 - protein, 167 aa, Zea mays
  Coding DNA Sequence Number=SeqID_39125
MAWASSLPLLAHGFPSLQRLPLPPVLDAPAAARAHEQGLHGREPFFPTATARRLSSLVHRSSSHGALSQLGPSGAASPNAPWHSAPCPWMQQQQPPLFPTKQQPRIPSASRASFDLRSPDPHRRVGVWDSSMPRHRSAQFDRLCASLRRICAAPTSTPFTLGEKPRA

SEQ ID NO: 80905 - protein, 166 aa, Zea mays
  Coding DNA Sequence Number=SeqID_39126
MELSQTPTRRCGSGLRRSNEARDAEGIRGCCFVGKRGGCCCCIHGQGAECHGAFGDAAPEGPSWDRAPWLELRCTREERRLAVAVGKKGSRPWRPCSCARAAAGASSTGGKGRRWREGKPWARRGRELAHAMDSRGNAGELDQRGCWQTMETGKQGAEGRSAKHRG

SEQ ID NO: 80906 - protein, 53 aa, Zea mays
  Coding DNA Sequence Number=SeqID_39127
  Homolog annotation: Hit_ID=Q71KW4; Match level="QueryCoverage=100%, HitCoverage=24%, E-value=1e-10, Identity=60%"; Hit description =Desiccation-associated protein
  Pfam annotation: Domain name=PBD; Domain location=27-52; Score=14.7; E_value=0.0034; Accession=PF00786.18; Description=P21-Rho-binding domain
MACKVKGIFKGLKAFSRIFAVKEHEMEIGCPTDVKHVAHIGWDSAAGGASPSW

SEQ ID NO: 80907 - protein, 116 aa, Zea mays
  Coding DNA Sequence Number=SeqID_39128
  Pfam annotation: Domain name=PBD; Domain location=2-49; Score=32.0; E_ value=2.1e-06; Accession=PF00786.18; Description=P21-Rho-binding domain
MEIGCPTDVKHVAHIGWDSAAGDASPSWMNDIMASSDLSSLGNFAALTGTSWVSQDLDSQQRVVAENTGRRDHSATCPDITRPPRNPGTKKPRDGSPPASPPSPAARVDAAADDAR

SEQ ID NO: 80908 - protein, 250 aa, Zea mays
  Coding DNA Sequence Number=SeqID_39129
  Homolog annotation: Hit_ID=Q6Z750; Match level="QueryCoverage=34%, HitCoverage=16%, E-value=2e-20, Identity=66%"; Hit description =Ankyrin-like protein
  Pfam annotation: Domain name=PBD; Domain location=2-49; Score=35.5; E_ value=1.9e-07; Accession=PF00786.18; Description=P21-Rho-binding domain
MEIGCPTDVKHVAHIGWDSAAGGASPSWMNDIMASSDLSSLGNFAALTGTSWVSQDLDSQQRVVAENTGRRDHSAREAHSAQRDSGLPTPRVVASAPPARAVSISPPRAPSPPLHLRAPSSPGLPTPARHDLHSCTSSPCNPPRSPFQLLHSLPAPDGSPVTLLLFATVRSVDAATVRALLTDAEASGTSLGTLAAAQMDVGETALYVATEASCEEAVSLLLLLYDLETATVCSRHNLDALHVAAKQGHT

SEQ ID NO: 80909 - protein, 687 aa, Zea mays
  Coding DNA Sequence Number=SeqID_39130
  Homolog annotation: Hit_ID=Q2QWW9; Match level="QueryCoverage=33%, HitCoverage=82%, E-value=1e-72, Identity=77%"; Hit description =Transcriptional regulator, Sir2 family protein, expressed
  Pfam annotation: Domain name=LRR_1; Domain location=428-450; Score =18.1; E_value=0.033; Accession=PF00560.23; Description=Leucine Rich Repeat
  Pfam annotation: Domain name=LRR_1; Domain location=452-475; Score =2.7; E_value=89; Accession=PF00560.23; Description=Leucine Rich Repeat
  Pfam annotation: Domain name=SIR2; Domain location=512-633; Score= -8.1; E_value=4.4e-10; Accession=PF02146.8; Description=Sir2 family
  Pfam module annotation: Pfam domain module=LRR_1::LRR_1::SIR2; Domain location=428-450::452-475::512-633
MWYYFLFANTNYTFPGRPICLWPREAHSAQRDSGLPTPRVVASAPPARAVSISPPRAPSPPLHLRAPSSPGLPTPARHDLHSCTSSPCNPPRSPFQLLHSLPAPDGSPVTLLLFATVRSVDAATVRALLTDAEASGTSLGTLAAAQMDVGETALYVATEASCEEAVSLLLLLYDLETATVCSRHNLDALHVAAKQGHTGVHTAAFCHPQPPRPDDLFDKAMNSFKLAKNQGKGSLPPLVLPLPRSAFSDRPWASYVSARLFYVSFTRRRHATTAPSPVSAPSVHSFHTHGNVPNPTPFLTRGIVATEAVGGLAKDRCGPDSAVAHHPATAVTYTNQTRRRGIAHHTRLLDGIDSRAQPDLSRSERRVVIWPPLVPAPMVVAAPVQLNLDEVCHGTTAAPTALRKQIDEGTYGNSISGAIPAALGNAKSLKFLRLDHNRLTGPIPRELAGLPNLGIVDFSNNDLCGAIPTDGAFQNIPRSRDKQIVPDSDPPSPKDVDLFYQFIDKRLMVVTGAGMSTESGIPDYRSPNGAYSTGFKPLSHQWAQAIDSLEVGQPGSGKSFGMQQRPDGDVEIDEKFWEQDFEIPSCHQCGGVLKPDVVMFGDNVPQERAESAKEAARTCDALLVVGSALMTMSAFRLARLAHEANAPIAAVSIGETRADSILSLKINARCGEILPRILQMGSLVVPD

SEQ ID NO: 80910 - protein, 94 aa, Zea mays
  Coding DNA Sequence Number=SeqID_39131
MDDGDGAAGFCPLLQPAETAAAAPAAEKLAGDEGAGALRVLRATGVAWEVGESAGNPQAGLGRDRGTGGGRFTAKRLGGGINRLRQGIKCSREP

SEQ ID NO: 80911 - protein, 94 aa, Zea mays
  Coding DNA Sequence Number=SeqID_39132
MDGGDGADGFCPLLQPAETAAAAPAVEKLAGDESAGALRVLRATGVAWEVGESAGNPQAGLGRDRGTGGGRFTAKRLGGGVNRLRRGIKCSREP

SEQ ID NO: 80912 - protein, 105 aa, Zea mays
  Coding DNA Sequence Number=SeqID_39133
  Gene Ontology: Mol. function=transferase activity
  Homolog annotation: Hit_ID=Q5VRY8; Match level="QueryCoverage=80%, HitCoverage=25%, E-value=3e-32, Identity=78%"; Hit description =Putative choline kinase
MAAADPPPREKVVPTLKRSASIDRIPVDARRILHRLAGDLWGGDMDPGALAVSQLRGAMTNEVFRITWLGGEAEGNGPRKVLVRIYGRGVEVFFDRADEIVALKK

SEQ ID NO: 80913 - protein, 319 aa, Zea mays
  Coding DNA Sequence Number=SeqID_39134
  Gene Ontology: Mol. function=kinase activity
  Homolog annotation: Hit_ID=Q5VRY8; Match level="QueryCoverage=36%, HitCoverage=34%, E-value=4e-42, Identity=81%"; Hit description =Putative choline kinase
MAAADPPPREKVVPTLKRSASIDRIPVDARRILHRLAGDLWGGDMDPGALAVSQLRGAMTNEVFRITWLGGEAEGNGPRKVLVRIYGRGVEVFFDRADEVRTFECMSRHGQGPPPPGPLCQRPRRGVHQLQCTLRLYHPKCVMCLLGSNPRLVFVMAHSRVARVLALPNPLRRGSARPGNVRRDLLPPSTPYSPPRSRDLLRSCHQCPPPPSLSSPSRLRSATVTRCEAAINAHVLLRAATFPGSRALLRRHTFWFSGTPSPRREPLQAVGEQRCCSRVVGVGVGGKFGVRRILAGHRICWSLEECFTDCFWVSLMIRG

SEQ ID NO: 80914 - protein, 119 aa, Zea mays
  Coding DNA Sequence Number=SeqID_39135
  Homolog annotation: Hit_ID=Q10R68; Match level="QueryCoverage=78%, HitCoverage=77%, E-value=1e-13, Identity=50%"; Hit description =Expressed protein
MEVYHCGVVTGVERAAPAVVGRSGAAELELGVVGLRLVAASWLVGLRVGEEVVAATEALVLLALAHLADLGEVHGVVQQCPVLRVLVPERRHSHPGVVGARILMASLLHAPPMHGVSEN

SEQ ID NO: 80915 - protein, 207 aa, Zea mays
  Coding DNA Sequence Number=SeqID_39136
  Homolog annotation: Hit_ID=Q10R68; Match level="QueryCoverage=45%, HitCoverage=77%, E-value=2e-13, Identity=50%"; Hit description =Expressed protein
MEVYHCGVVTGVERAAPAVVGRSGAAELELGVVGLRLVAASWLVGLRVGEEVVAATEALVLLALAHLADLGEVHGVVQQCPVLRVLVPERRHSHPGVVGARILMASLLHAPPMHGMWSEFSGQLNNHDAVGKRMQELYLEGWGGRQRRPMDDAFGPTMVRTGTKAAAQRRQKPTSREKLRIGGDSGVGRTGGGVDAREPSDDTDGTD

SEQ ID NO: 80916 - protein, 229 aa, Zea mays
  Coding DNA Sequence Number=SeqID_39137
  Gene Ontology: Cellular component=membrane
  Homolog annotation: Hit_ID=Q2R1X7; Match level="QueryCoverage=62%, HitCoverage=35%, E-value=2e-14, Identity=33%"; Hit description =Integral membrane protein DUF6 containing protein, expressed
  Pfam annotation: Domain name=DUF6; Domain location=96-221; Score=0.4; E_value=0.062; Accession=PF00892.11; Description=Integral membrane protein DUF6
  Pfam annotation: Domain name=TPT; Domain location=87-221; Score= -11.3; E_value=0.0025; Accession=PF03151.7; Description=Triose -phosphate Transporter family
  Pfam module annotation: Pfam domain module=DUF6::TPT; Domain location= 96-221::87-221
MGLAIYDGGRGRGMGWERVVGKDRAGCRMPRKAKPPRYRGKVGAELSRGSQRDAAPCRMQSASLGGAAGAGCIARFGPASSYDWILGCCCLVAGVTVFALVTVLQAATLAAFPALLTMCCATSATGASLTAVLRLVLEGRFLGMGSPRIDATLVAGIVVLGGAAVGACMAFQAWCLGRKGPLFVSVFGPVQTVCTAILSAALLRQVLSLGRAIVGVTLIFYSNTFPSDI

SEQ ID NO: 80917 - protein, 777 aa, Zea mays
  Coding DNA Sequence Number=SeqID_39138
  Gene Ontology: Mol. function=protein binding; Cellular component =intracellular; Biological process=protein modification process
  Homolog annotation: Hit_ID=Q96H31; Match level="QueryCoverage=70%, HitCoverage=97%, E-value=0.0, Identity=94%"; Hit description=UBC protein
  Pfam annotation: Domain name=Tash_PEST; Domain location=250-268; Score=6.2; E_value=8.9; Accession=PF07708.2; Description=Tash protein PEST motif
  Pfam annotation: Domain name=Tash_PEST; Domain location=326-344; Score=6.2; E_value=8.9; Accession=PF07708.2; Description=Tash protein PEST motif
  Pfam annotation: Domain name=Tash_PEST; Domain location=402-420; Score=6.2; E_value=8.9; Accession=PF07708.2; Description=Tash protein PEST motif
  Pfam annotation: Domain name=Tash_PEST; Domain location=478-496; Score=6.2; E_value=8.9; Accession=PF07708.2; Description=Tash protein PEST motif
  Pfam annotation: Domain name=Tash_PEST; Domain location=554-572; Score=6.2; E_value=8.9; Accession=PF07708.2; Description=Tash protein PEST motif
  Pfam annotation: Domain name=Tash_PEST; Domain location=630-648; Score=6.2; E_value=8.9; Accession=PF07708.2; Description=Tash protein PEST motif
  Pfam annotation: Domain name=Tash_PEST; Domain location=706-724; Score=6.2; E_value=8.9; Accession=PF07708.2; Description=Tash protein PEST motif
  Pfam annotation: Domain name=ubiquitin; Domain location=250-318; Score=138.0; E_value=2.5e-38; Accession=PF00240.13; Description =Ubiquitin family
  Pfam annotation: Domain name=ubiquitin; Domain location=326-394; Score=138.0; E_value=2.5e-38; Accession=PF00240.13; Description =Ubiquitin family
  Pfam annotation: Domain name=ubiquitin; Domain location=402-470; Score=138.0; E_value=2.5e-38; Accession=PF00240.13; Description =Ubiquitin family
  Pfam annotation: Domain name=ubiquitin; Domain location=478-546; Score=138.0; E_value=2.5e-38; Accession=PF00240.13; Description =Ubiquitin family
  Pfam annotation: Domain name=ubiquitin; Domain location=554-622; Score=138.0; E_value=2.5e-38; Accession=PF00240.13; Description =Ubiquitin family
  Pfam annotation: Domain name=ubiquitin; Domain location=630-698; Score=138.0; E_value=2.5e-38; Accession=PF00240.13; Description =Ubiquitin family
  Pfam annotation: Domain name=ubiquitin; Domain location=706-774; Score=138.0; E_value=2.5e-38; Accession=PF00240.13; Description =Ubiquitin family
  Pfam module annotation: Pfam domain module=Tash_PEST::Tash_PEST::Tash_ PEST::Tash_PEST::Tash_PEST::Tash_PEST::Tash_PEST::ubiquitin::ubiq itin ::ubiquitin::ubiquitin::ubiquitin::ubiquitin::ubiquitin;
  Pfam module annotation: Domain location=250-268::326-344::402 -420::478-496::554-572::630-648::706-724::250-318::326-394::402 -470::478-546::554-622::630-698::706-774
MEHPFFLQGKTENPNHVEQNRVGLETKKPEIKKLEKKHEIETNFSKTKGGQKRKSEEHTYIPSQAEDLAEESRGEDGGADGLDGPEDGDEQRALPAQAPRLERHARANRGPAEDDDPRDKRGVDPGRPHAEEPPFQDEPQDGGERGTRRGGGAAHGEQRGEGGERGGLQDGDEREDGDAGDEAAAAEDPVVGGSRTKPGNATCRCTRRRKRGGGENRARAGGEKIEQNTSEAQRKHSVEVSRGEMQIFVKTLTGKTITLEVESSDTIDNVKAKIQDKEGIPPDQQRLIFAGKQLEDGRTLADYNIQKESTLHLVLRLRGGMQIFVKTLTGKTITLEVESSDTIDNVKAKIQDKEGIPPDQQRLIFAGKQLEDGRTLADYNIQKESTLHLVLRLRGGMQIFVKTLTGKTITLEVESSDTIDNVKAKIQDKEGIPPDQQRLIFAGKQLEDGRTLADYNIQKESTLHLVLRLRGGMQIFVKTLTGKTITLEVESSDTIDNVKAKIQDKEGIPPDQQRLIFAGKQLEDGRTLADYNIQKESTLHLVLRLRGGMQIFVKTLTGKTITLEVESSDTIDNVKAKIQDKEGIPPDQQRLIFAGKQLEDGRTLADYNIQKESTLHLVLRLRGGMQIFVKTLTGKTITLEVESSDTIDNVKAKIQDKEGIPPDQQRLIFAGKQLEDGRTLADYNIQKESTLHLVLRLRGGMQIFVKTLTGKTITLEVESSDTIDNVKAKIQDKEGIPPDQQRLIFAGKQLEDGRTLADYNIQKESTLHLVLRLRGGQ

SEQ ID NO: 80918 - protein, 105 aa, Zea mays
  Coding DNA Sequence Number=SeqID_39139
MGLFGWFLSPTWLCEPGSLESGSGDATNLLVSGEPGPRCFKDRASLDPNLHASNQTQSSHAHSLAHSNQTAATRIPRCKHAQMQATKQTQCVVGPEILWDANGGG

SEQ ID NO: 80919 - protein, 156 aa, Zea mays
  Coding DNA Sequence Number=SeqID_39140
MATGFNVIRCVGTRAQRINNEKRRWMHCALATASEVVTVATILYGTATRYRGSLEPGSGDATNLLVSGEPGPRCFKDRASLDPNLHAGNQTQSSHAHSLAHSNQTAATRIPRCKHEQMQATKHTLRVGHRRPIRDSELLPRPQANGEPLTESLWHG

SEQ ID NO: 80920 - protein, 394 aa, Zea mays
  Coding DNA Sequence Number=SeqID_39141
  Gene Ontology: Cellular component=nucleus
  Homolog annotation: Hit_ID=Q2QN39; Match level="QueryCoverage=94%, HitCoverage=98%, E-value=6e-27, Identity=27%"; Hit description =Expressed protein
MPSSTPPSVQPTPSLQTLTSPAVAQNTHIDVSEIKSKIFKRIGHERGNKYFQHLERFLSSRLSKNEFEKLCLVALGRENLPLHNHLICSILHNASRACGPPVINDPKLVRGATTSGHAVVPPVWDNGGALNLNAKEKKPLIRRENVLTQKSSLNHCETIMLENGVHHLSDLKRCTQFQKKDHVELLIKRPRVEKEPVSLHNSLHSNRFSKASRENLGQEIIHQFQGPVQAPLGIQLRHGSFGVAQIPLPLASVSSKDTSDTCIEDGELCDTSSVKKRMDKVAGANGLEGVSIECANLLNNGIDVFMKQLIGSCIELVRARSRHGKLRHETLKQQLCRKLINGVSVHNHVPGQSSVIPPETNSISMQDLKAVIELNPCLLGINASLLHEKINSYD

SEQ ID NO: 80921 - protein, 353 aa, Zea mays
  Coding DNA Sequence Number=SeqID_39142
  Gene Ontology: Cellular component=nucleus
  Homolog annotation: Hit_ID=Q2QN39; Match level="QueryCoverage=98%, HitCoverage=90%, E-value=4e-23, Identity=27%"; Hit description =Expressed protein
AQNTHIDVSEIKSKIFKRIGHERGNKYFQHLERFLSSRLSKNEFEKLCLVALGRENLPLHNHLICSILHNASRACGPPVINDPKLVRGATTSGHAVVPPVWDNGGALNLNAKEKKPLIRRENVLTQKSSLNHCETIMLENGVHHLSDLKRCTQFQKKDHVELLIKRPRVEKEPVSLHNSLHSNRFSKASRENLGQEIIHQFQGPVQAPLGIQLRHGSFGVAQIPLPLASVSSKDTSDTCIEDGELCDTSSVKKRMDKVAGANGLEGVSIECANLLNNGIDVFMKQLIGSCIELVRARSRHGKLRHETLKQQLCRKLINGVSVHNHVPGQSSVIPPETNSISMQDLKAVIELNP

SEQ ID NO: 80922 - protein, 154 aa, Zea mays
  Coding DNA Sequence Number=SeqID_39143
  Gene Ontology: Mol. function=nucleoside-triphosphatase activity; Cellular component=chloroplast; Biological process=protein metabolic process
  Homolog annotation: Hit_ID=Q8GT62; Match level="QueryCoverage=72%, HitCoverage=12%, E-value=2e-50, Identity=83%"; Hit description=ATP -dependent Clp protease ATP-binding subunit
MGESAPEITMLLDSRQIEEPYQRFDLQQLFLNDEQWKHPFCIASTTLDEHRLHFEKDKALARRFQPVLVNEPSQEDAVKILLGLREKYETYHKCKYTLEGINAAVYLSARYIPDRHLPEAGSRARMESFKRKKEEQCFILSKSPDEYWQEIRAV

SEQ ID NO: 80923 - protein, 221 aa, Zea mays
  Coding DNA Sequence Number=SeqID_39144
  Gene Ontology: Mol. function=nucleoside-triphosphatase activity; Biological process=protein metabolic process
  Homolog annotation: Hit_ID=Q8GT62; Match level="QueryCoverage=46%, HitCoverage=11%, E-value=8e-36, Identity=69%"; Hit description=ATP -dependent Clp protease ATP-binding subunit
MDKVAGANGLEGVSIECANLLNNGIDVFMKQLIGSCIELVRARSRHGKLRHETLKQQLCRKLINGVSVHNHVPGQSSVIPPETNSISMQDLKAEDAVKILLGLREKYETYHKCKYTLEGINAAVYLSARYIPDRHLPEAGSRARMESFKRKKEEQCFILSKSPDEYWQEIRVVQSTHEVALANRLKYSLDENDKGDGVNTEVIGDNKYFPLMPPTSINIWW

SEQ ID NO: 80924 - protein, 161 aa, Zea mays
  Coding DNA Sequence Number=SeqID_39145
  Gene Ontology: Mol. function=peptidase activity
  Homolog annotation: Hit_ID=Q655R7; Match level="QueryCoverage=88%, HitCoverage=48%, E-value=1e-35, Identity=52%"; Hit description=OTU -like cysteine protease-like
  Pfam annotation: Domain name=OTU; Domain location=4-142; Score=77.8; E_value=3.5e-20; Accession=PF02338.9; Description=OTU-like cysteine protease
MEKFRALSDQLYRSPDYHKNVRKEIVKQLKECNSLYEGYVPMKYKHYCKKMKKYGYYYINFAASIIEVPEFVIFLTVVLLKINFSRYGEWGDHVTLQAAADKFAAKICLLTSFRDTCFVEIVPQYQAPQREIWLSFWSEVHYNSLYDARAVAVQPAKWGKP

SEQ ID NO: 80925 - protein, 418 aa, Zea mays
  Coding DNA Sequence Number=SeqID_39146
  Homolog annotation: Hit_ID=Q338C4; Match level="QueryCoverage=29%, HitCoverage=20%, E-value=2e-38, Identity=64%"; Hit description=KH domain containing protein, expressed
  Pfam annotation: Domain name=KH_1; Domain location=108-154; Score =20.3; E_value=0.0056; Accession=PF00013.19; Description=KH domain
  Pfam annotation: Domain name=KH_1; Domain location=195-246; Score =24.1; E_value=0.00049; Accession=PF00013.19; Description=KH domain
  Pfam annotation: Domain name=KH_2; Domain location=108-153; Score =1.5; E_value=0.078; Accession=PF07650.7; Description=KH domain
  Pfam annotation: Domain name=OTU; Domain location=335-415; Score=5.1; E_value=0.017; Accession=PF02338.9; Description=OTU-like cysteine protease
  Pfam module annotation: Pfam domain module=KH_1::KH_1::KH_2::OTU; Domain location=108-154::195-246::108-153::335-415
MPGSPTNPCLSFSSPPASVGEEDGDLVALVEMAEAAECEEERDLFADANDDVGIAGLEVADGEVHPPHHAQLQQPDEMVQHVNPSSYILFELIFLHLDVNLDISDGSACTTFIQRKKVGAIIGHKGERVKRLCEETRACVRIIGGHLCAAEQAVIIFGREQLDEPLPPAMDALLRVYQQTINNDSLDVGPDNVIVRQILAPSEQAASLIGEHGVMINSIMEASQTDIRVLGNELPSDLIDTLLKWIPSNDEELRLRLSSRSTATPHASVAAFASAPVSHTAPWLGKFIAFEPFNVGGFDWAIYFYPDGKSGEDGMLIHGGKKKLNAYSLFEVRVSGDGNCQLKECNSLYEGYVPMKYKHYCKKMKKYGEWGDHVTLQAAADKRLRISSPSTPALGTINKESKSKDVIPQWLSLRYVLL

SEQ ID NO: 80926 - protein, 69 aa, Zea mays
  Coding DNA Sequence Number=SeqID_39147
METNTHSNAEKQGGDIDASHDTPTYTGPLFYQTPSGHTLLNFEEHESYSKSPQSYDQTVLDAYLDKTLP

SEQ ID NO: 80927 - protein, 822 aa, Zea mays
  Coding DNA Sequence Number=SeqID_39148
  Gene Ontology: Mol. function=cysteine-type peptidase activity; Biological process=proteolysis
  Homolog annotation: Hit_ID=Q53MK8; Match level="QueryCoverage=40%, HitCoverage=33%, E-value=5e-27, Identity=26%"; Hit description=Ulp1 protease family, C-terminal catalytic domain, putative
  Pfam annotation: Domain name=Peptidase_C48; Domain location=578-810; Score=-15.5; E_value=0.0081; Accession=PF02902.9; Description=Ulp1 protease family, C-terminal catalytic domain
MKSMDRPPANPKRITIESSQEFFSVEIPRSASIGVHPNTKHSVHPPAPVDRPSVIHEANDQTGSGNDDDDFMTPTKKRNATGSPIKILRKTCTKRMKVVKTPRQTMQKLNVRCNPQDVIITIKILNERQRQAVARKGFSNILDMTLDALGSRSHLCWLMDKLDQKDMTIRPGQGKELKITKEIVHLILGLPNAGGGKPLRIDEAVAGDNLRVELGLSKDEFVVASLQDRLRKGDDDDLSIRCFFLIWFNRLLFPTSSWGISNHEVLLTEEMDRFHETDWCHLIFNDLCEAAQKWHTRSTTNVSATIYGCSVVILLPSMIVYINYCFFVVVLFGPLALCCSPHNKRGTPRIKFFDKNIIQALTKADKRKPRQSGEPFGHYEHRDRTNIFYVPCPNPCGHHTIHIQLPLIKDMLSSKIKQLQPRNWPKFIEKIVEYDSEVGKACSIIKSTLTKMVVKQYELADTFAELIDDVLRAESGDPDNAAEAPQTDKPPDISQHMSSEAHIHKGTQNTPDLTMPYSQTNTELTGTQFEEIHEKQQQMRRAFEGCPDDLDVTAPMETNTNSNAEKQGGDIDASHDTPTYTGPLFDQTPSGHCFRDEEINHCSSINKNRLVLDVNVGTLLNFEEHERYSKSPQIFDQTVLDDYLDKTLPQLDNFVDYKTIMVPILHMGHWTLYVINFQFRCIHILDSNPYGLELGGTTWKMFHYSQKDIGSRKLPWARVIMNRLNKSLQQVRPNSRIPKFGNFPIDMPPMCPTMIAGSNDCGFFVMRYIQYYDYMDGSIKHYIQRENSGDLRSLALYYLTFHSKNKCLPLPPEIQRFKFARK

SEQ ID NO: 80928 - protein, 130 aa, Zea mays
  Coding DNA Sequence Number=SeqID_39149
MNAAKELREQSATLEHTRPWRAGHRRWRAEHRGARREEDTPGSYAGLAESEQGGRGSGRGHGWGGKSSWGAAMGGAGTRHELEQGAAAGRWDKTRNARARRYTTDEKYQMEGGGWRFFRGMTSGEESYGS

SEQ ID NO: 80929 - protein, 563 aa, Zea mays
  Coding DNA Sequence Number=SeqID_39150
  Gene Ontology: Mol. function=3'-5'-exoribonuclease activity; Cellular component=cytosol; Biological process=negative regulation of transcription from RNA polymerase II promoter
  Homolog annotation: Hit_ID=Q108Z7; Match level="QueryCoverage=57%, HitCoverage=14%, E-value=1e-127, Identity=74%"; Hit description =Transcriptional regulator, putative, expressed
  Pfam annotation: Domain name=KOW; Domain location=495-528; Score =26.0; E_value=0.00013; Accession=PF00467.19; Description=KOW motif
  Subcellular localization annotation: CTP_CleavageSite=42; ConfidenceScore=5.66e-01
MAHCSSSSPSRFPARVLQSPSSAASQPLCSLANSPQPPESPSCGASSSPTQIVLPPLGAPSARPHGAGRVPLRRSLLLALPCRGNRPAAPALPAERFSAPARRTPLLAASCSPSAVHGAARAQLFLSLPLFLPRCALRCSALQRRCPARQGRVCFSAALCSRSSFATASIEPNFHDLYLKFFDKVNSKSLNKEILKATYENCKVLLRSDLIKSSSEERYLLKNLGNWLGKFTIGRNQALRAKEIDPKSLIVEAYEKGLMIAVIPFTSKNLTVDIKDVKPTSLLKDRLREVEGNPDFSNKDVTASQTSVVAEVPSGTIPSLTHMEQQPEINITSRAMSLPNILNQYAAPVCLPTNNTVEDDKVALMMPEQVPSLTQVSPAQTQSTSPSPFSVNQLMAAIPREEICFKINPKLGSLGPQLQYSKIMDLALDKANREIILPVIQRSVTIASRTTKELILKDYALESDNNTITRSAHLMVRTLAGSLAHVTCKARIIKFDVGNVVMVTGGRNTGRVGVIKNRKKHKAALRPSTCCLELFAMSSFLLFVVQENIEYNSNLMVAKVWRL

SEQ ID NO: 80930 - protein, 133 aa, Zea mays
  Coding DNA Sequence Number=SeqID_39151
  Homolog annotation: Hit_ID=Q2RBJ3; Match level="QueryCoverage=37%, HitCoverage=6%, E-value=4e-08, Identity=80%"; Hit description =Sodium/hydrogen exchanger family protein, expressed
MDQERPFAVTNYHQRRTDRKTNSQIRSKNRWMHTYLYPPPAAPLPPPRKNSLLPFKIWFPLLFALSLLRGSDSKAQGQRPMMSRSNFSLMARTTDAVPSASSTVFSMYTTPLVVPVPAPELLQQLLVPRRSTG

SEQ ID NO: 80931 - protein, 121 aa, Zea mays
  Coding DNA Sequence Number=SeqID_39152
  Gene Ontology: Mol. function=solute:hydrogen antiporter activity; Cellular component=integral to membrane; Biological process =regulation of pH
  Homolog annotation: Hit_ID=Q2RBJ3; Match level="QueryCoverage=94%, HitCoverage=15%, E-value=1e-27, Identity=57%"; Hit description =Sodium/hydrogen exchanger family protein, expressed
MCLLQRAALYFLGGADDREALAYAARMPETGTMSLTVVRFKLRNWVGMGGRDEARRGTRSCCRSSGAGTGTTSGVVYVEKTVEDAEGTASVVRAMSEEFCIHGGGGGIEASSPSMAKSSGE

SEQ ID NO: 80932 - protein, 121 aa, Zea mays
  Coding DNA Sequence Number=SeqID_39153
  Gene Ontology: Mol. function=solute:hydrogen antiporter activity; Cellular component=integral to membrane; Biological process =regulation of pH
  Homolog annotation: Hit_ID=Q2RBJ3; Match level="QueryCoverage=94%, HitCoverage=15%, E-value=1e-27, Identity=57%"; Hit description =Sodium/hydrogen exchanger family protein, expressed
MCLLQRAALYFLGGADDREALAYAARMPETGTMSLTVVRFKLRNWVGMGGRDEARRGTRSCCRSSGAGTGTTSGVVYVEKTVEDAEGTASVVRAMSEEFCIHGGGGGVEASSPSMAKSSGE

SEQ ID NO: 80933 - protein, 428 aa, Zea mays
  Coding DNA Sequence Number=SeqID_39154
  Gene Ontology: Mol. function=inositol or phosphatidylinositol phosphatase activity; Biological process=vascular tissue development (sensu Tracheophyta)
  Homolog annotation: Hit_ID=Q6ZK18; Match level="QueryCoverage=55%, HitCoverage=23%, E-value=1e-101, Identity=71%"; Hit description =Putative inositol 1,4,5-trisphosphate 5-phosphatase
  Pfam annotation: Domain name=Pkinase; Domain location=10-204; Score= -84.4; E_value=0.0016; Accession=PF00069.15; Description=Protein kinase domain
  Pfam annotation: Domain name=Pkinase_Tyr; Domain location=10-224; Score=-169.2; E_value=0.043; Accession=PF07714.7; Description =Protein tyrosine kinase
  Pfam annotation: Domain name=WD40; Domain location=250-303; Score =14.3; E_value=0.45; Accession=PF00400.22; Description=WD domain, G -beta repeat
  Pfam annotation: Domain name=WD40; Domain location=306-342; Score =15.2; E_value=0.23; Accession=PF00400.22; Description=WD domain, G -beta repeat
  Pfam annotation: Domain name=WD40; Domain location=345-381; Score =7.6; E_value=4.8; Accession=PF00400.22; Description=WD domain, G -beta repeat
  Pfam module annotation: Pfam domain module=Pkinase::Pkinase _Tyr::WD40::WD40::WD40; Domain location=10-204::10-224::250-303::306 -342::345-381
MPGRRRRGLVVFHGEIEWGIGRFRVYGRGKEEGPRGSEKNSFCLIKKGGHLHWDTRYKIAVEAAKGLSYLHLDCSQPILHHDVKSNNILLDSNFEEHVADFGLAKFLQDSVTSQCMSAIAGSYGYIAPGEIWSGSEGGIIKAWPWDTIAKSLSFTSGISHKAVSLVEKSYIDLRNHATIGNLCSLLAADVKHMLADSCRAKVWRLTSMTFALWDAKTRELLKVFGIDGQVDLARPEAPVMPEQFIEEEIKKSRNALMGAADAVRRVATKGTCVEDNRRTEAVAQAMNGTIWSGCTDGSIIVWDGNGNRLREFHYHSSSVRCIKTLGDRVWVGYTSGTIQVIDVKGNLQAGWIGHSCPVIDMAISDSYIFSLAHHGGIRGWPLSSPSSLDDIPPGVAPEASEEWLDSSEVLMPRAMLRVVWSFPHASWP

SEQ ID NO: 80934 - protein, 266 aa, Zea mays
  Coding DNA Sequence Number=SeqID_39155
  Gene Ontology: Mol. function=metal ion transporter activity; Cellular component=membrane; Biological process=metal ion transport
  Homolog annotation: Hit_ID=Q8S1N1; Match level="QueryCoverage=32%, HitCoverage=20%, E-value=3e-18, Identity=52%"; Hit description =Putative magnesium transporter
  Pfam annotation: Domain name=CorA; Domain location=56-263; Score= -60.5; E_value=0.0028; Accession=PF01544.9; Description=CorA-like Mg2+ transporter protein
MHSAVSKYATTPWGESPGWLSAAPLNEHQPKEDQKIHLQAPGTTQQQATPWRSRIQGALGEGAAELTDMEGESPIVASPFPVPSSSKGHEMEMTKKTAAVVPEMTSSSSMPNLAVAKDGNTKVLPFEFRALEVCLESACRSLEEETSTLELEAYPALDELTSKISTLNLERVRQIKSRLVAISGRVQKVVPTSIFLQETFFTNLVSACENIMFLKVRDELEHLLDDEMDMAEMYLTEKLTQQEISEASSRAEVDDASLTEDDRQVS

SEQ ID NO: 80935 - protein, 192 aa, Zea mays
  Coding DNA Sequence Number=SeqID_39156
  Gene Ontology: Mol. function=metal ion transporter activity; Cellular component=membrane; Biological process=metal ion transport
  Homolog annotation: Hit_ID=Q94F85; Match level="QueryCoverage=15%, HitCoverage=7%, E-value=9e-08, Identity=96%"; Hit description =Plastid division protein FtsZ
MGTRETHGLDNIDPAFLRYKNTEKSYGDIYLYIDEWCDANWQVMAARSPNVRLQRLSTGRTRAAPVVAQISKEAGYLTVGVVTYPFSFEGQVSPEAGLGGALVPTSIFSRAELADMEGESSIVASPFPVPSSSKGHEMEMTKKTAAVVPEMTSSSSMPNLAVAKDGNTKVLPFEFRALEVCLESACRSLEEE

SEQ ID NO: 80936 - protein, 298 aa, Zea mays
  Coding DNA Sequence Number=SeqID_39157
ENNVDAESNTERRGLTGVNDDNDEAAQKQKQSASVDGVLFTVPYKTASPQSAETPGLLQEIDDAWLVVHFVEHTASVNGALRSSREEASAEGSRPWATASSLQSMDREPTALRGRGTGRAWLEERGELLVAMGEKKGRRRGSFNSGALGCWTAHRGQQRKAGAVEKGCSKLLAGARARPWERRGKEEGEPAGGDGRARLHADMELAIWSSGRGRPWLLGELGMERLLAAVMREEEGVPCSCTLGRRGGRHGRRGSSMLQPLAGGAGRAPGHGWPRGGAPAVNPAHAEKTAAKGRAGGR

SEQ ID NO: 80937 - protein, 127 aa, Zea mays
  Coding DNA Sequence Number=SeqID_39158
MELAIWSSGRGRPWLLGELGMEKLLAAVMREEEGAPCSCMLGRRGGRREGAGPWLAEGRSSCRQPCTRRESSGQGESRGALGQGPARGGRRLGRHGEEGSRAPCALGKKVLLRVGEEDREAVAAGNC

SEQ ID NO: 80938 - protein, 114 aa, Zea mays
  Coding DNA Sequence Number=SeqID_39159
MALSPVLERPPGREAGEREARHWRGESASESDVARSDWSTCRDLIGPLDLIRLRIREPDSESLVNIVLEALKTPRRKCPDQWGVIVQRRLRERQRRRGKGRKPRAANQQVKHSK

SEQ ID NO: 80939 - protein, 297 aa, Zea mays
  Coding DNA Sequence Number=SeqID_39160
MSGWSPDLNTFTDLLQSDGSPTTLLLDESSSLHRRSDVSASLPRALFPAARPPPYPYPYHLYQYPPSSYGQPPTSQAGIQASFPVRPYAPPPPAADGSQASFQIPPYAPPSYAPPPYGAPHPYAPPTYGAPPPVAPLSVGSENQAEENPVPKEKRPKRLEWTKGKMVMDAAMARFEGKMGHPFKRHHWWQVVRHEPKWSAKHGLGSGSDSTANKRTRLGVSGEYSSGGTEDTEEEVPRPVGRDRAKAAARKTKTKGKGKEATSSESTSEAFKMKNLWGGLVKAKLFEAMEHPKGPIN

SEQ ID NO: 80940 - protein, 145 aa, Zea mays
  Coding DNA Sequence Number=SeqID_39161
MAHRTVRCTPDSPVPLPRHHCRWILTVGASDLWARLGVRCTPDRCKPNSLSVLPPTPRAKGKGADLAKSTKVSKTGAKSEAAVAAGKAKKLPAANSTADAGAKPTKSGKKAPVLADAKAKANATVVSKEESAAEVGVEEDVVLTN

SEQ ID NO: 80941 - protein, 133 aa, Zea mays
  Coding DNA Sequence Number=SeqID_39162
MGDSDFCARRGRIKCAAESRWRGDDRCSAGLRCKPNSLSVLPPTPRAKGKGADLAKSTKVSKTGAKSEAAVAAGKAKKLPAANSTADAGAKPTKSGKKAPVLADAKAKANATVVSKEESAAEVGVEEDVVLTN

SEQ ID NO: 80942 - protein, 369 aa, Zea mays
  Coding DNA Sequence Number=SeqID_39163
  Gene Ontology: Mol. function=ubiquitin thiolesterase activity; Cellular component=intracellular; Biological process=ubiquitin -dependent protein catabolic process
  Homolog annotation: Hit_ID=Q10RB2; Match level="QueryCoverage=99%, HitCoverage=23%, E-value=1e-125, Identity=61%"; Hit description =Ubiquitin carboxyl-terminal hydrolase family protein, expressed
MEARLVPSAPSPRRSNEIKKATKTSEERRQEIEVRLAAMRLLQQQKEQSNGVVSATPASSQSQGDEAPSSSLSLVGGHRADRRKGGSRKATGLSASERTDQARAYWGSIPVDQRLAFLNTSISELKSHYASAIHKEKDVASAASDVLNEVIRFANKHGNWEFMVCGRCRGQFTDVEAHRWHVMGEHVGLLSSELQEMVPQEIDADWVEMLIGWNWSPLDATAALKLFEEDQTDNLGTDRGKESDPTDNWSNKDNPDMSESSASPHNGECNGFGVVVREGDGTWPLSDDDERAKILERIHSLFKILVKNHNLSVFNLNRVIRFAVEELRGLSSGSLLLNHSLDKSPLCICFLEASSLWKVAKFLQDLVQA

SEQ ID NO: 80943 - protein, 1412 aa, Zea mays
  Coding DNA Sequence Number=SeqID_39164
  Gene Ontology: Mol. function=ubiquitin thiolesterase activity; Cellular component=intracellular; Biological process=ubiquitin -dependent protein catabolic process
  Homolog annotation: Hit_ID=Q10RB2; Match level="QueryCoverage=99%, HitCoverage=94%, E-value=0.0, Identity=51%"; Hit description =Ubiquitin carboxyl-terminal hydrolase family protein, expressed
  Pfam annotation: Domain name=DUF627; Domain location=2-83; Score= -36.1; E_value=0.0038; Accession=PF04781.3; Description=Protein of unknown function (DUF627)
  Pfam annotation: Domain name=DUF629; Domain location=237-729; Score =16.3; E_value=2.8e-09; Accession=PF04780.3; Description=Protein of unknown function (DUF629)
  Pfam annotation: Domain name=UCH; Domain location=1116-1408; Score =0.6; E_value=1.6e-06; Accession=PF00443.19; Description=Ubiquitin carboxyl-terminal hydrolase
  Pfam module annotation: Pfam domain module=DUF627::DUF629::UCH; Domain location=2-83::237-729::1116-1408
MVLSFARAASVLDDPAARARRHRAALQAAQRAVELAPDSIELSHFHAMLLFDAATDTRAYEEVVAECERGLSIEAPSDPAPHSLRLPGPDVDQVQSELRNLIQKANLASVSTWFKTLRSAGDDKFRLIPVHRFADEPMEARLVPSAPSPRRSNEIKKATKTSEERRQEIEVRLAAMRLLQQQKEQSNGVVSATPASSQSQGDEAPSSSLSLVGGHRADRRKGGSRKATGLSASERTDQARAYWGSIPVDQRLAFLNTSISELKSHYASAIHKEKDVASAASDVLNEVIRFANKHGNWEFMVCGRCRGQFTDVEAHRWHVMGEHVGLLSSELQEMVPQEIDADWVEMLIGWNWSPLDATAALKLFEEDQTDNLGTDRGKESDPTDNWSNKDNPDMSESSASPHNGECNGFGVVVREGDGTWPLSDDDERAKILERIHSLFKILVKNHNLSVCNLNRVIRFAVEELRGLSSGSLLLNHSLDKSPLCICFLEASSLWKVAKFLQDLVQASGINRNLENDGLGDRDSSPQNHNVLEKVILSSDSSELIIDGQTFGGKFDSESVDTDTLFSWLYAGSSIGEQLLAWNRMIDERSNQCMDLIRALGREFNNLQNSCERKLEQLRNEEAFISVEDLLCEEQTRREQVEQYGFQSFEEILRKRQAELLERNTEVQSDSNRSEIDAISAVLKKLHTSHFGYDDAFSGMAPRLFDLDGVEDEWRLHDFIHPNDSMVHTVISKMKEKVTVEISKIDAQIMRNLSVMRHLEHKLGPASALDYRMILLPLMRSFLQSHLGELVDKDAKERSDAAREAFLAELSLDAKKNASKGADMKQSHEKSKDKKKFKDSRKSKELKDSSWSNQSLIHQDSTDEGTSETSQMLADCDDLCCKCSTSEDYFNEQEEELRHRVQLEAEERKLEEALEYQRWIEEEAKQKHLAEQCRSTHASSVIGTASLSSTVSLNRDPDNHESALNNSSHTYLEGIKFGDFSYTENENNFSQKLNGIEFDSSDAHALTSSDMSVSMLTLKMNGVCNNAQPIKPLGNFGTQNPKRSSSEPQRYSQGHSAGIEKPNFEKVGSGAIPSTDVCIEDDFDKRFQEDLDEAVRQSLGCDAYPAGTVSTSNGTEVYGTGLKNAAGEYNCFLNVIIQSLWHIRRFRDEFLKTSLLHKHVEDPCAVCALYGIFIDLSKASKGQREAVAPTSLRIALSKSYPNSKFFQEGQMNDASEVLGVIFECLHKSYTSRTVYHGVSHEKNSIGSWDCANISCITHNLFGMDMMCPDSSFDELLKVVIMNDQLACDQDVGGCGTPNHIDHILSNSPHVFTVVLGWQNNKERVDDISATLAGISTEIDISIFYRGLDQGGKHTLGSVVCYYGQHYHCFAFKDGRWVMYDDQTVKVIGSWGDVLVMCEKGHLQPQVLFFEAAN

SEQ ID NO: 80944 - protein, 178 aa, Zea mays
  Coding DNA Sequence Number=SeqID_39165
MAGGIKLTGAKEKWLAGEGGDKDDGYDYAYGNGSARLATDVVHAKAWAPPLLQRAEAKTIKDFKDRITEAAKTTRLCLPQYKKGPMCNPAIVVGPVRRLPLASHGTTGAFAKALCNHIRTINKPTFSLQPSNLVNILAEARSAGREAPSCGDSSQTGESIRKENTVVFKLIIGSLERG

SEQ ID NO: 80945 - protein, 83 aa, Zea mays
  Coding DNA Sequence Number=SeqID_39166
MAGGIKLAGAKERWLAGEEIWSQEIWFVSLPKPEANPRILKGYSWYDRSGSISNSGLCYDLGQQSNTLLQLRYMEYTVNGRHL

SEQ ID NO: 80946 - protein, 222 aa, Zea mays
  Coding DNA Sequence Number=SeqID_39167
  Subcellular localization annotation: CTP_CleavageSite=37; ConfidenceScore=5.03e-01
MSGAPEDSNSNSPPSGISGGTHAIIHRTVRCTPDSVRCAMEERPQELASFGNLQRLVRYNSPDMSGVPRTVRCNSGATAIRRQRLPATQLMRAQRAQKSGAPILAHRTRHSACPVCTGHPGGPTSQKLQRSESNGTGDVAGAPDMSGLHIQVVHVQVVVSFLKLLLHIVELVDHEVLSAVEGELGGLSEVSKKVVRVFKATASVVSSVLNPMVSELRERQPG

SEQ ID NO: 80947 - protein, 137 aa, Zea mays
  Coding DNA Sequence Number=SeqID_39168
VLNSAGYPTPPLYTVQLYKEHRVPRCRVLLTLEAHPLQPGWRSLNSETIGFRTDDTTEAVALKTLTTFCGYHPLEMVMHPLGLFPAEKRDDPMWCNRVGHVKDDNTIDVLENQLHDVQQELEEANDHLDMHHLDMEA

SEQ ID NO: 80948 - protein, 112 aa, Zea mays
  Coding DNA Sequence Number=SeqID_39169
MAGGRLLRRAGGWFPPPEAGRGGGQPTRAGGRAPARLALCPSKDGGSPYLCPQPSWAESSPTRSKVLPLWREGWVPRVMQAGLEQKKPNHRARCMQPPGGYKRPSTFAQTSG

SEQ ID NO: 80949 - protein, 502 aa, Zea mays
  Coding DNA Sequence Number=SeqID_39170
  Homolog annotation: Hit_ID=Q6QP51; Match level="QueryCoverage=11%, HitCoverage=31%, E-value=5e-09, Identity=56%"; Hit description =Putative growth-regulating factor 1
MEYTTLGVNYTFGEVRPSLGRRSSRRISTLKDDISTTPGPSLPGSSPGIRPEQTARPATPRPRPAVPRRHEPGPRPRQLNSGVGSASGRPGQAPADQVFFSKPALPLFEPTPLPPASAHRRAAEGTNAATGRLLFVSPLKGREPDIKAKEPCGVRLFTNAAPANAGRSIAHRQDTSSAELGDGFHHQKLEEEVASRPVREGLVVTVLGDHRRGDAAGPRDGNPRSRTMAERYQLPQSCVPPTTRRKDCGCSPSGGSEGGKTRCMREREDMVAFQGGHPPFKGDSPYLRPQPSRAESSPTRSKVLPLRRGGRVPRVMQAGPGQKKPNRRARCMQLPSGYKHSSTFRLDQRVKGRTAMHSARNHAKWVHPFDFQRTQHGGPGPRVMQPARQLLRASNCTATRTTTTPPRLRNQYRDSRQPCVRPNSASQARRRSKRRFAFAIMTASKKAPSLPTDQRFKGWPLGGVQQPQSAWVPRPLLVRGSKAGPSEGFNCRLKPLGLRAHY

SEQ ID NO: 80950 - protein, 575 aa, Zea mays
  Coding DNA Sequence Number=SeqID_39171
MEVRCQTSFCQNEDGFPKLLRVGTVRLGIRSQPEYDGREFVEHDTEKCVVTVYIGSSPHHVEWSVTAVGHRFRDTCQVVARKALRALCQIYEEEVADTPLRFFPPFQRDRPIWMARMRALEEQQLLEDDPTVVYLTTYLHTLDAQYDFLTRHHRQMIARAEDAEKLNRQLHVNLTTAQARATALESREVIAVEALKQAKDEHVQKLMEAYLVTHNQRRALRIQEPAPSNPVQPRRAEDPQILEGHPVSIRGEKKAWELPEGARVLEGIPVSPKAMDKQEHPESSQDPPPELFEPLAMKKILAPSLEVKEEAASTPPLLPPSEELQEPVPLEEEFDPVLPSQSLPEEVFSKNIDHKLELILTLCFHSHLNPSEEKSALPKKISGSLPLKHGISYRGTYPVAQSKGPITPPVGRAKRKKEGSEKVKSEKRKEDSEEKTRRRFSQNQPCASHPSAASSSSNSRRRPRNTLVMRYFKEFKSPRFKRSTLILFKWGSVLARFLLWRKRRRPAASLSRTRSPKLISFWMRSGYPSFVDEAPEDQSRKESMWEFARERFACWHRCFLNKLAAKRKLKPEDDL

SEQ ID NO: 80951 - protein, 245 aa, Zea mays
  Coding DNA Sequence Number=SeqID_39172
MKKIPAPSREIKEEVASTPPTPPPSKELQEPVQLEEEFDRRLAISVAARRSHQHQLPLDPSRRCLRLKLKVFSKNIDHKLELILTLCFHSHLNPSEEKSALPKKIPGSLPLKPGISYRGTYPVAQSKGPTVRIKALPLSQSKQEKRTEGVITIQRGKDSWNQRPQTSGSSTPPLTCAPACVPASMRTSTTAHAPFAAHYRRPPPFAAHPPPPSSPATPGPLPLSHLLPRVTCSITTTPHHPSFGR

SEQ ID NO: 80952 - protein, 116 aa, Zea mays
  Coding DNA Sequence Number=SeqID_39173
MERGREPDTPGSRYGSKEIEQGGLGQARLGKERRGCAVRRGRGLGELTAGAGTAKGERHWLGMTIGTALAWCSTERQGRREAAWGEKVPVCFSFSRLLATKSCYGLPNTQLFSQLL

SEQ ID NO: 80953 - protein, 78 aa, Zea mays
  Coding DNA Sequence Number=SeqID_39174
MEVAETVAGAAVGGAAACGGGGCAGGACCGPGDDMVGRHTKPAAALFWPPKAATDCQTLSFSASFYKIRLGKNHSKST

SEQ ID NO: 80954 - protein, 152 aa, Zea mays
  Coding DNA Sequence Number=SeqID_39175
MNSRRGSSGRRRFRRRRTLRWRVEDRPTVFGASRELGGMLDGSREDPGRWERSSRASASGTSNTGEQHRAAASCASSTGEWHSSVVEAGGECEELQGMREITGEEEGAQARGASAQEGEQWLETRQHDEDSTDEWDFAQIVAKVPEGLPHPE

SEQ ID NO: 80955 - protein, 185 aa, Zea mays
  Coding DNA Sequence Number=SeqID_39176
MLDGSRDREDPGRWERSSRASASGTSNTGEQHRAAASCASNTGEWHSSVVEAGGECEELQGMREITGEEEGAQVRGASAQEGEQWLETRQHDEDSTDVSWGTRMRAGQTSMNACALSTLALKPARLAVRRAPGYASECVEPLGATFSGSGSCSLGGAVFDTLFGRAPARSRSCSGALPNGLLIVT

SEQ ID NO: 80956 - protein, 209 aa, Zea mays
  Coding DNA Sequence Number=SeqID_39177
  Homolog annotation: Hit_ID=Q9ZQW0; Match level="QueryCoverage=49%, HitCoverage=65%, E-value=4e-41, Identity=86%"; Hit description =Response regulator 1
  Pfam annotation: Domain name=Response_reg; Domain location=111-208; Score=17.0; E_value=0.00017; Accession=PF00072.14; Description =Response regulator receiver domain
MAMQIFVHGEMLEFERAFIDFYNSILHKNETVLQERATTTLRGRRASGDGAVEADGRRQRTLGPATTAVVPSVSAIATAAAAPASVAPSLAPKANDSRKAVVPVDASELEKHVLAVDDKSIDRAAIARILRGSRYRVTAVESAMRALELLAMGLLPDVSMIITDYWMPGMSGYELLKRVKESAALRGIYVAIMSSMTIVIYTFSNKILR

SEQ ID NO: 80957 - protein, 107 aa, Zea mays
  Coding DNA Sequence Number=SeqID_39178
MEHVVYANIVCAYYVHRAHDPAHALTIIQSHAATIKTPPCRQGLGFSGGGGSLGRASGGDPGGQQRCRLEAGDRRRRSTRNERQRRSEAGGQAVTALSKRTDDGSAP

SEQ ID NO: 80958 - protein, 63 aa, Zea mays
  Coding DNA Sequence Number=SeqID_39179
MVKATMSGKLKEMDWEKKIKICELVEQDPGYVRILYTLFASLNLDYQTSVVRLFFSYEFLLVR

SEQ ID NO: 80959 - protein, 56 aa, Zea mays
  Coding DNA Sequence Number=SeqID_39180
MAAEIVKAAMSGKLKEMDWEKKIKICELVEQDPGPAAQVGRDPRFEPVYGSVDKEG

SEQ ID NO: 80960 - protein, 144 aa, Zea mays
  Coding DNA Sequence Number=SeqID_39181
MAAEMVKAAMSGKLKEMDWEKKIKICELVEQDPGQSAGTELYILQLDGVHEVDAVALPWGKETHEDSKAKAKQRDCEGRTLLINHEDELHAYGEGVDGICNFFDKNAQTAALIVAKYIKFITEQVIGLRLANDNGTSAKHIRKN

SEQ ID NO: 80961 - protein, 144 aa, Zea mays
  Coding DNA Sequence Number=SeqID_39182
MAAEMVKAAMSGKLKEMDWEKKIKICELVEQDPGQSAGAELYILQPDGAHEVDAVALPWGKETHEDSKAKAKQRDCEGRTLLINHEDELHAYGEGVDGICNFFDKNAQTAALIVAKYIKFITEQVIGLRLANDNGTSAKHIRKN

SEQ ID NO: 80962 - protein, 359 aa, Zea mays
  Coding DNA Sequence Number=SeqID_39183
  Homolog annotation: Hit_ID=Q655R9; Match level="QueryCoverage=10%, HitCoverage=4%, E-value=6e-12, Identity=91%"; Hit description =Oligomeric golgi complex 7-like
MVVVDVSEFGTEDFDPKRWINAALDARHPSEPLDRFLTSTGISSRIVGFRPSIFLTYDDDSRRLTGEIWTLKFHCIGAQSGKEIVTVNIDKAYVAFYNMVYIKSKLGYSRRDFLFYKKRCGIDRSRLLALDYIHQEEAMLSDNMDERKISFVLTKDPPSDLEVSITPIKRPRQRTNVDEETIEVSIDAYKEWLAILQHDNPETDEEIHGSSKPTANWPSHARRHRKRDPDVIGIYVDNDGVFKKEGRGTLKGIAAATKRMKNGDHKLKIEFSSKLGGPTINLLFISKLKQRRWEFPTNEDAHEKIWSIAKERYKGWRSMLSSTYKAYNSYAERMKNKPEDVDIVEWHYMILYFGSEKFQ

SEQ ID NO: 80963 - protein, 110 aa, Zea mays
  Coding DNA Sequence Number=SeqID_39184
LIYSLEYINSPPNVTSMPWISGLDGAGHEQRDDEVAHAECDSDAVAGAPPQRGSRAATKLQGPHHGPSTAIGAESGNIQQTGQLGTVPPKQRTPESMRRAAEVIAGGDVG

SEQ ID NO: 80964 - protein, 68 aa, Zea mays
  Coding DNA Sequence Number=SeqID_39185
  Subcellular localization annotation: CTP_CleavageSite=29; ConfidenceScore=5.62e-01
MARATSSATTRLPTQSATATRWQVHHLSVAAARPPSCKALTMVLVPPSAPSLVSPTVALGFHMGASLK

SEQ ID NO: 80965 - protein, 117 aa, Zea mays
  Coding DNA Sequence Number=SeqID_39186
  Homolog annotation: Hit_ID=Q6ZFI7; Match level="QueryCoverage=35%, HitCoverage=31%, E-value=7e-08, Identity=81%"; Hit description =Calcium-binding EF-hand family protein-like
  Subcellular localization annotation: CTP_CleavageSite=70; ConfidenceScore=5.38e-01
MSVEILDGSTVLRGGRARLQLLGGRPLRRAGRRPRRPAHLRNQVLPSRLSKRRRAERPRPSAAEQSARVQASSATERVRPTGAAEPAIAEGVLPLRAAPSVDQPLQDLLPRVLGKLG

SEQ ID NO: 80966 - protein, 62 aa, Zea mays
  Coding DNA Sequence Number=SeqID_39187
MERCELGLGDVLTVNSGRCSRQRAMLETLMEILMTMNSKSNDTPVIFQWEIAHVIYFRFTLM

SEQ ID NO: 80967 - protein, 55 aa, Zea mays
  Coding DNA Sequence Number=SeqID_39188
MGKRGSGGVGSPRYHGDVFLAKRVILEPLMEILTTMNSKSNDTPVIFLWEIAPVI

SEQ ID NO: 80968 - protein, 142 aa, Zea mays
  Coding DNA Sequence Number=SeqID_39189
  Gene Ontology: Mol. function=ATP-dependent helicase activity; Cellular component=nucleus; Biological process=rRNA processing
  Homolog annotation: Hit_ID=Q6YS30; Match level="QueryCoverage=68%, HitCoverage=19%, E-value=1e-37, Identity=80%"; Hit description =Putative RNA helicase
  Pfam annotation: Domain name=DEAD; Domain location=8-138; Score=14.8; E_value=3.1e-07; Accession=PF00270.19; Description=DEADDEAH box helicase
MDYKGLKNEHRHYENGCSVYTMKNCSEHRHYEKLISDVLSEAGAPCGIKSVCIYGGTKKEPQISALKSGVDIVIGTHGRMKDLIEMGVCCLNEVSFVVLDEADRMLDLGFEPEVRAILSQTSSGLYPLLSLPTEEAAFCSRT

SEQ ID NO: 80969 - protein, 507 aa, Zea mays
  Coding DNA Sequence Number=SeqID_39190
  Gene Ontology: Mol. function=ATP-dependent helicase activity; Cellular component=nucleus; Biological process=rRNA processing
  Homolog annotation: Hit_ID=Q6YS30; Match level="QueryCoverage=80%, HitCoverage=79%, E-value=0.0, Identity=87%"; Hit description =Putative RNA helicase
  Pfam annotation: Domain name=DEAD; Domain location=112-285; Score =227.2; E_value=3.6e-65; Accession=PF00270.19; Description=DEADDEAH box helicase
  Pfam annotation: Domain name=Helicase_C; Domain location=357-433; Score=124.6; E_value=2.7e-34; Accession=PF00271.21; Description =Helicase conserved C-terminal domain
  Pfam module annotation: Pfam domain module=DEAD::Helicase_C; Domain location=112-285::357-433
MGRNLPAEQVEAPRSSKMDKKRKKDKKRKLAAEAEEEAAVTATVETVKSSKKKRVENEPGAGAVEAENGAEKTVAVTGKGSEDPKYAPLRSFSAAELPSQVLECCSAFARPSPIQAHAWPFLLDGRDFIGIAATGSGKTIAFGVPALMHIRKKVGGKAGKKAVPRCLVLSPTRELAQQIADVLSEAGAPCGIKSVCLYGGTKKEPQISALKSGVDIVIGTPGRMKDLIEMGVCCLNEVSFVVLDEADRMLDLGFEPEVRAILSQTSSVRQMVMFSATWPLAVHKLAQEFMDPNPIKVVIGSEDLAANHDVMQIVEVLDDRTRDSRLLALLDKYHQAQSNRVLVFVLYKKEAARVETMLQRRGWKAVSVHGDKAQHDRTKALSLFKEGKCPLMIATDVASRGLDIPDVEVVINYSYPLTTEDYVHRIGRTGRAGKKGVAHTFFTQANKALAGELVNVLREADQVVPPALMKFGTHVKKKVWMPSNVSKSTERNTFENAVGEYILKKSL

SEQ ID NO: 80970 - protein, 166 aa, Zea mays
  Coding DNA Sequence Number=SeqID_39191
MVTSSSMAGRSEPGCDLGPALSFKDVHHPGWGGGRAEPELYLPRGFVGQPLPQHSRERALSGPAGGSDFDNAGLVDGGRHQLQRIGLAGSARGAPSRRKGGCRAARTGGPPKTSRASRAAFVFGAVLPLPRCWGLNMYVFLARSRVFSSFRALRLAYRLSEPLHQA

SEQ ID NO: 80971 - protein, 59 aa, Zea mays
  Coding DNA Sequence Number=SeqID_39192
  Subcellular localization annotation: CTP_CleavageSite=44; ConfidenceScore=5.50e-01
MGEGLMAAASALRSSLLLFGPPGQKSSSSLLLERATSRVFSSFRALRLACRLSEPLHQA

SEQ ID NO: 80972 - protein, 183 aa, Zea mays
  Coding DNA Sequence Number=SeqID_39193
MVTGGRNTGRVGVIKNWEKHKGSFEPKPALSGCTGQCPVCQAGSGELGALGNKLTAYGYNSPDCPVCTGLSGEPTVGRANGRLRDLRETRGRANGREGHRTVRCAPDSVRCANGSKAANGSPIHPPLGALTVARSVRAQGRARRRLLLRPRPGSGEDAIPPEAEAEAEPWGRARRRPLPEAEA

SEQ ID NO: 80973 - protein, 114 aa, Zea mays
  Coding DNA Sequence Number=SeqID_39194
MKLGQSVYHMDWQVSFSFLHIKVKPKKKARYCSSVFMSMQQQLCLVSGDKWRWHYQFLDVPGMFGLLYSDIVWLNIFKIDLETNKIMDFFKFDVDNVVMVTGGRNTGRVGVIKN

SEQ ID NO: 80974 - protein, 61 aa, Zea mays
  Coding DNA Sequence Number=SeqID_39195
MWKETVGDESREFGRYMRQREEQEKQEAELFTRAPVTKHDKQIEKRIRRQLHGEKIYNCSN

SEQ ID NO: 80975 - protein, 129 aa, Zea mays
  Coding DNA Sequence Number=SeqID_39196
  Homolog annotation: Hit_ID=Q5N7Y0; Match level="QueryCoverage=95%, HitCoverage=28%, E-value=1e-17, Identity=42%"; Hit description =Leucine zipper factor-like
AWKETVGDESREFGRYMRQREEQEKQEAELFTRAPVTKHDKQIEKRIRRQLHGTWFAHWDFQLVLISNVHHHLIFDPDNRLGGLTDDFGLGMNMLLGGDKEDDGGSRKSHGKSGNRKKHLKNSKKRMRH

SEQ ID NO: 80976 - protein, 493 aa, Zea mays
  Coding DNA Sequence Number=SeqID_39197
  Homolog annotation: Hit_ID=Q6QP51; Match level="QueryCoverage=11%, HitCoverage=25%, E-value=4e-16, Identity=78%"; Hit description =Putative growth-regulating factor 1
  Subcellular localization annotation: CTP_CleavageSite=20; ConfidenceScore=5.17e-01
MHEGSAKAWLPSKGVAPFLKATLPTCVLSRHRLSLHQRAPKSSPYDTGAGSHTSCKPAGIEEAKPPRAERVTAQRLQALLHFRPDQRVEGRTSMQAACNCTKGVHPFDFDASSMEAQAHTSCNRRAGYYVRETAPPLVPVPCLLDCGTGTATRGNPAHGPTVPTKHIGHGSASRGRRCDDRYGQKWASSNGGGRRAEAAVKLSAGSRPLLGQRESPLPRREDDAPVFRSSNGSRTHNGCPANHSSRRINSTAGQVTPLAGEAGDASPPHDDRVKKGTGKGDTPKGILLREGSGPRALLLIRGSKTSPSEGFDSRLRALGLRAHYWSEPPQATRAPRLLLIRGSKVGPSEGFDSRLRALGLRAHYWSEVRRLAPQKGSTAASGHSGSTPTTDQGFEGWPPKGFDSRLRTRRARDDSGVKTPSAQGTRSRLARAQPRARTADPGGFTPRPRVSSSNGRTFDSPEAQLGQASWRSNLGQIASPTDHIAGAFNARIV

SEQ ID NO: 80977 - protein, 398 aa, Zea mays
  Coding DNA Sequence Number=SeqID_39198
MGRVAFKKGATPLDGSHAFVLPFMHCALPPSEPSDGERPRFFRLAVVGGAQLRGSWYLSAIARLQGFSSGSPAASPHRWSPKTVTTSLMVGRSKPGYGLCPALSFKDLHHPCWGGGRAEPKLYLPYGPAGHLLLQHSRKRALTGLAEGADFDNAGPIVRKRRQLQCSRFAGSAGSSTASGLEWGSAGGQVAAVVGAEVVAAEEVLVADKIVAAICAPGLRLFGFDSLSSPLEWGRGRGPCRSSVCPEVIAAAVWPPGAEVVVAAVGESLGSVGLAARGFSCSVKETLGRSAMSRSRRQRRGADVFLRGGDPPTVSPSEAGPDFAEGGVDVEGATAPLLMSEPAGSVCLYGITYPSVSYLSQKVMSEDPTIEVVEKHERCSGRKTFSEENFDAEGVPPF

SEQ ID NO: 80978 - protein, 421 aa, Zea mays
  Coding DNA Sequence Number=SeqID_39199
MGARAAASGAGKLPSAEPAKERRPLSSARTDVAVAHVANFDMDICVGDYLVGLNAGQLAVVPTPVAAPSPTAVVGFIVFMWLRISLFLWRATDFADHVASGALTSEFAVEIERLRAQHTDTVREKSATENKSHKLTERLAAAEAEKGDLRRQLAEESRDANKAIVDAQAAQAEVKLARAEASLARQRVEELEVRINRLRNRVDKTEVSTSAEVERTHAQFVDAYRELGARTAAFEAPGQEAGLCFLERLQEELGVLPTIVTGLMSFASLVTYEGVVNALSREGCGHFEVFNLLNEGFKREIFQVEDPVLKRSAGVLFDRMWGPHGRETVRERSDRAIDQMAHDEEVEDLGEQDSTLPEASRVELAPPSDAGKGPSATPAPTGAGEDPALAPALTGEEASKAVGEPVAEDPAAVAGPSQVAE

SEQ ID NO: 80979 - protein, 350 aa, Zea mays
  Coding DNA Sequence Number=SeqID_39200
MALNEVGERRNSGGANESTPHCLYTRRNSEVEDLQGLPVAVMCSHYYVAFPPFEVAEDDRDEGALWCAARMSSERDLVEEFIGYGVWPLAHGWALGEVCPRQMPSLGEQQVRSPAFTLDLRGRDPAAFMREVEDGTMRIVGRYVPRTEALRSRDIRGSNVRLNRVFELNRLPYGGFLGDDAVVVVDRSGKKPVAAAGEGSSREATPAMKKRKLGTAAEGLGVSDHFAVVLMGTCTALGGRLSSPELRESSARMLKFTGGRWPRDVPIPRAAMMEKDRQDAAWKRRAVTRVGDHFRDAKKARGGAKSGAPGSSKPPPTAKPAAPGPSKSSAGARAAGSGAGKLPSAEPAKE

SEQ ID NO: 80980 - protein, 771 aa, Zea mays
  Coding DNA Sequence Number=SeqID_39201
  Homolog annotation: Hit_ID=Q69NN2; Match level="QueryCoverage=99%, HitCoverage=92%, E-value=0.0, Identity=58%"; Hit description =Hydroxyproline-rich glycoprotein-like
PFHEVKRKRDKKKESAGQKSFADSTGQVDQNPQWMRPHTHRMENDQRRLPNQGQMSGPSHEFRVVRDNRFQHGVVENRPEPGHKGSADVQMSDRSTVVQSARNLSPATTSDGQITHQNAMQNSQSDITQGKRDGQGTTQKHAKPYLKNSQNEQHFPGSDPAHGSATVRIAGGTVGPTRRHVGVINSSRQFVGRSGSQMHAPGGSSYANIQRGSFTSVGASGRYSAFMSRNIQQNLRADTTFRGRPTGRSFIAQNVNRYHQGPTTNQKAVHPIKEWKPKLTKKSPTIDAENSIADAASPSASNCENANTTDVNGLPEKLSQANLHEVEHVIIPEHLRVPEYEQTKLSMPYLNVILALCVQEPVQQVSEGDSLDDGHDDMDEQARSSQHLSSSTAEISLSPSEDSDQMSGQVENDDGLGLVQSDTPVGAADGDSTQITSTLTAFSAYGHKDPNIHTTNEAQLYGLVEPNVHPQALASSSQGYPSENPEADNAVQVFRMPDSNVHSQVLPSTSEALNPQIVSNSPVPISSQQQHISQQQAATQMYPQMHVQHFPNFMPYRQLYSPVYPMPMPNYSPNVPYPSNGNSYLQMPSGGSHLTAGSVKYGVSQYKPVPSGNPSGYGNYTHPAGFTMGSPGVIGAAVGVDDVNRMKYKDNIYASTPQVETSDIWIQTAREMPPLQVPSYYNIPGQATPGAFVPNPANASFNATSQSPHAQFPGLYHPQQPPSIVSPHPMVHQQVPSAIGPNVGVGVAAPGPQVGAYQQRQIGHMNWRPSF

SEQ ID NO: 80981 - protein, 550 aa, Zea mays
  Coding DNA Sequence Number=SeqID_39202
  Homolog annotation: Hit_ID=Q69NN2; Match level="QueryCoverage=94%, HitCoverage=62%, E-value=1e-163, Identity=59%"; Hit description =Hydroxyproline-rich glycoprotein-like
  Pfam annotation: Domain name=DUF1296; Domain location=27-86; Score =136.4; E_value=7.6e-38; Accession=PF06972.2; Description=Protein of unknown function (DUF1296)
  Subcellular localization annotation: CTP_CleavageSite=13; ConfidenceScore=5.06e-01
MAGVGGGARSSDRAGAARSPTTTTTTTTRGIQSTIQSIKEVVVGHSDADILDTLRESNMDPNETAQKLLNQDPFHEVKRKRDKKKESAGQKSFADSTGQVDQNPQWMRPHTHRMENDQRRLPNQGQMSGPSHEFRVVRDNRFQHGVVENRPEPGHKGSADVQMSDRSTVVQSARNLSPATTSDGQITHQNAMQNSQSDITQGKRDGQGTTQKHAKPYLKNSQNEQHFPGSDPAHGSATVRIAGGTVGPTRRHVGVINSSRQFVGRSGSQMHAPGGSSYANIQRGSFTSVGASGRYSAFMSRNIQQNLRADTTFRGRPTGRSFIAQNVNRYHQGPTTNQKAVHPIKEWKPKLTKKSPTIDAENSIADAASPSASNCENANTTDVNGLPEKLSQANLHEVEHVIIPEHLRVPEYEQTKLSMPYLNVILALCVQEPVQQVSEGDSLDDGHDDMDEQARSSQHLSSSTAEISLSPSEDSDQMSGQVENDDGLGLVQSDTPVGAADGDSTQITSTLTAFSAYGHKDPNIHTTNEAQLYGLVEPNVHPQALASSSQ

SEQ ID NO: 80982 - protein, 843 aa, Zea mays
  Coding DNA Sequence Number=SeqID_39203
  Gene Ontology: Mol. function=nucleic acid binding; Cellular component= chromatin; Biological process=chromatin assembly or disassembly
  Homolog annotation: Hit_ID=Q6YNJ6; Match level="QueryCoverage=90%, HitCoverage=56%, E-value=0.0, Identity=78%"; Hit description =Chromatin-remodeling factor CHD3
  Pfam annotation: Domain name=Chromo; Domain location=40-84; Score =28.9; E_value=1.7e-05; Accession=PF00385.14; Description='chromo' (CHRromatin Organisation MOd
  Pfam annotation: Domain name=DEAD; Domain location=117-305; Score= -35.2; E_value=0.0052; Accession=PF00270.19; Description=DEADDEAH box helicase
  Pfam annotation: Domain name=DUF1086; Domain location=745-828; Score=- 34.2; E_value=0.0049; Accession=PF06461.2; Description=Domain of Unknown Function (DUF1086)
  Pfam annotation: Domain name=DUF1087; Domain location=668-733; Score =52.0; E_value=2e-12; Accession=PF06465.4; Description=Domain of Unknown Function (DUF1087)
  Pfam annotation: Domain name=Helicase_C; Domain location=474-553; Score=97.1; E_value=5.2e-26; Accession=PF00271.21; Description =Helicase conserved C-terminal domain
  Pfam annotation: Domain name=ResIII; Domain location=113-299; Score =16.7; E_value=1.8e-06; Accession=PF04851.6; Description=Type III restriction enzyme, res subunit
  Pfam annotation: Domain name=SNF2_N; Domain location=119-417; Score =364.3; E_value=2e-106; Accession=PF00176.13; Description=SNF2 family N-terminal domain
  Pfam module annotation: Pfam domain module=Chromo::DEAD::DUF1086::DUF1 087::Helicase_C::ResIII::SNF2_N; Domain location=40-84::117-305::745
MEEDELMAVSGVGGSLDRRRGGRDLSLLSGGGGSSLAGGGEAKNLVGDREYYVKWNELTYEECTWENESDITVFQPEIERFNEIQFRRKKSGDKGKATREPRQFKESPTFLSGGTLHPYQLEGLNFLRYSWFHNKRVILGDEMGLGKTIQSIAFLASLFEDKFGPHLVVAPLSTLRNWEREFATWAPQMNVVMYFGAAASRDIIRKYEFYYPKEKLKKLKKKKSSPSNEDKKQSRIRFDVLLTSYEMINMDSSILKNIEWECLVVDEGHRLKNKDSKLFGQLKDYNTKHRVLLTGTPVQNNLDELFMLMHFLEGESFGSITDLQEEFKDINQDKQIEKLHGMLKPHLLRRFKKDVMKELPPKKELILRVELTRKQKEYYKAILTKNYEVLARRNGGHTSLINVVMELRKLCCHGFMIDEPDLEPANPEEGLRRLLDSSGKMQLLDKMMVKLKEQGHRVLIYSQFQHMLDLLEDYLSYRKWTYERIDGKISGADRQIRIDRFNAKNSTRFCFLLSTRAGGLGINLATADTVIIYDSDWNPHADLQAMARAHRLGQTSKVMIYRLVSRGTIEERMMQLTKKKILLEHLVVGRLTKANNVNQEELDDIIRYGSKELFEDENDESRQIHYDEAAIERLLDRDQVDGDESVEDEEEDGFLKGFKVANFEYIDEAKAQAEKEEARRKAAAEAENSERNYWDELLKDRYDVQKVEEHTAMGKGKRSRKQMAAADEDDIHDLSSEDEDYSLEDDISDNDTSLQGNISGKRGQYSKRKSRNVDSIPLMEGEGRTLRVLGFNHAQRAMFLQTLNRKKCRGNPEAKGGPGAAVEPTVCNRKVLGSSPNLCILCG

SEQ ID NO: 80983 - protein, 321 aa, Zea mays
  Coding DNA Sequence Number=SeqID_39204
  Gene Ontology: Mol. function=nucleic acid binding; Cellular component= chromatin; Biological process=chromatin assembly or disassembly
  Homolog annotation: Hit_ID=Q6YNJ6; Match level="QueryCoverage=87%, HitCoverage=21%, E-value=7e-92, Identity=67%"; Hit description =Chromatin-remodeling factor CHD3
  Pfam annotation: Domain name=DUF1086; Domain location=200-306; Score=- 19.8; E_value=0.00022; Accession=PF06461.2; Description=Domain of Unknown Function (DUF1086)
  Pfam annotation: Domain name=DUF1087; Domain location=123-188; Score =52.0; E_value=2e-12; Accession=PF06465.4; Description=Domain of Unknown Function (DUF1087)
  Pfam module annotation: Pfam domain module=DUF1086::DUF1087; Domain location=200-306::123-188
MARAHRLGQTSKVMIYRLVSRGTIEERMMQLTKKKILLEHLVVGRLTKANNVNQEELDDIIRYGSKELFEDENDESRQIHYDEAAIERLLDRDQVDGDESVEDEEEDGFLKGFKVANFEYIDEAKAQAEKEEARRKAAAEAENSERNYWDELLKDRYDVQKVEEHTAMGKGKRSRKQMAAADEDDIHDLSSEDEDYSLEDDISDNDTSLQGNISGKRGQYSKRKSRNVDSIPLMEGEGRTLRVLGFNHAQRAMFLQTLNRIMTGKSIFLVLKEKVSRKSRDQIVKNLGHSFAKGGPGAAVEPTVCNRKVLGSSPNLCILCG

SEQ ID NO: 80984 - protein, 148 aa, Zea mays
  Coding DNA Sequence Number=SeqID_39205
  Subcellular localization annotation: CTP_CleavageSite=35; ConfidenceScore=5.74e-01
MACVAALFASPALLPFPSTTSSMASCSCRLRPAVVARAPRQQPRGRRALRRFDEVEGVSKKRRGIGGGGGVGAGGSQPSSSRRDRGLSVDFKEPQVAEFDDLEEDKFLNAVVKASCFSPQQARTFVLERRRRSASQFIKKGDKQKRSD

SEQ ID NO: 80985 - protein, 392 aa, Zea mays
  Coding DNA Sequence Number=SeqID_39206
  Homolog annotation: Hit_ID=O82261; Match level="QueryCoverage=32%, HitCoverage=19%, E-value=1e-29, Identity=56%"; Hit description =Protease Do-like 2, chloroplast precursor
  Subcellular localization annotation: CTP_CleavageSite=40; ConfidenceScore=5.66e-01
MVISRSNRLAFILASSSGSVYAPLRSVSLSRLCGSQSSPPSSHPHTAFCSRVISRPPVLPCAIPLAIPLLCSRCRRGHLHHVQAIVCFSNCSCRNRGRRGYTCFPDASRKARSGDRAPDRGDGTLVLDRGSIVLNLRVCSPILVTADHPKANEYYSDPRLAAYVVPYAPILSCLLLYLIWLLVNSTDAAKSSLRREVEGVSKKWRGIGGGGSVGASGLQPSSSRRDRGLFVDFKEPQVAEFDDLEEDKFLNVVVKMRPLILKVTIFTHLELRSSLCILQDMSFHSAFMIGDGKLLTNAHCVEHDTQVKVKRRGDDKKYIAKVLARGVECDLALLSVENEEFWRGTEALHFGRLPCLQFDFLGKDSIRYFNTIEIEELVYKAIEGFCAGISLT

SEQ ID NO: 80986 - protein, 112 aa, Zea mays
  Coding DNA Sequence Number=SeqID_39207
  Gene Ontology: Mol. function=serine-type endopeptidase activity; Cellular component=chloroplast thylakoid membrane; Biological process=proteolysis
  Homolog annotation: Hit_ID=O82261; Match level="QueryCoverage=64%, HitCoverage=12%, E-value=2e-28, Identity=78%"; Hit description =Protease Do-like 2, chloroplast precursor
MSFHSAFMIGDGKLLTNVHCVEHDTQVKVKRRGDDKKYIAKVLARGVECDLALLSIENEEFWRGTEALHFGRLPCLQFEFLGKDSIRYFNTIEIEELVYKAIEGFCAGISLT

SEQ ID NO: 80987 - protein, 392 aa, Zea mays
  Coding DNA Sequence Number=SeqID_39208
  Homolog annotation: Hit_ID=O82261; Match level="QueryCoverage=32%, HitCoverage=19%, E-value=1e-29, Identity=56%"; Hit description =Protease Do-like 2, chloroplast precursor
  Subcellular localization annotation: CTP_CleavageSite=40; ConfidenceScore=5.66e-01
MVISRSNRLAFILASSSGSVYAPLRSVSLSRLCGSQSSPPSSHPHTAFCSRVISRPPVLPCAIPLAIPLLCSRCRRGHLHHVQAIVCFSNCSCRNRGRRGYTCFPDASRKARSGDRAPDRGDGTLVLDRGSIVLNLRVCSPILVTADHPKANEYYSDPRLATYVVPYAPILSCLLLYLIWLLVNSTDAAKSSLRREVEGVSKKWRGIGGGGSVGASGLQPSSSRRDRGLSVDFKEPQVAEFDDLEEDKFLNVVVKMRPLILKVTIFTHLELRSSLCILQDMSFHSAFMIGDGKLLTNAHCVEHDTQVKVKRRGDDKKYIAKVLARGVECDLALLSVENEEFWRGTEALHFGRLPCLQFDFLGKDSIRYFNTIEIEELVYKAIEGFCAGISLT

SEQ ID NO: 80988 - protein, 121 aa, Zea mays
  Coding DNA Sequence Number=SeqID_39209
  Gene Ontology: Mol. function=DNA binding; Biological process =regulation of transcription
  Homolog annotation: Hit_ID=Q5Z9V2; Match level="QueryCoverage=62%, HitCoverage=31%, E-value=6e-24, Identity=72%"; Hit description =Putative NAM1 protein
MDTIMPQENQNRLLVEQWLAMCVMNIIACEGVDRLAEGLALCDEFLLSQSQTSCGGGDEPRETKPCLAAYAHLSAEDFKKDLEECQRLEPTDNTNLELDNTDEFRLSQIVWFRYHQLPSLK

SEQ ID NO: 80989 - protein, 314 aa, Zea mays
  Coding DNA Sequence Number=SeqID_39210
  Gene Ontology: Mol. function=DNA binding; Biological process =regulation of transcription
  Homolog annotation: Hit_ID=Q5Z9V2; Match level="QueryCoverage=70%, HitCoverage=92%, E-value=4e-68, Identity=63%"; Hit description =Putative NAM1 protein
  Pfam annotation: Domain name=NAM; Domain location=4-105; Score=25.3; E_value=7.4e-10; Accession=PF02365.6; Description=No apical meristem (NAM) protein
  Subcellular localization annotation: CTP_CleavageSite=57; ConfidenceScore=5.18e-01
MKASVTLIHKNFQESSLSISGVKQNGSVSHFFHRTFKAYNTGTRKRRRINTDDADVRWHKTGKTKPVLVDGKHLGCKKIMVLYISPLKGGKAEKTNWVIHQYHLGTGEDERDGEYVVSKLFFQQQFKPGDKNAQELTTSDDLESMAAESNLPDFTTLPTDKHVGTVQEVVHNPEHNLYQLNRNCEISIEETVVLPPSVKTTKDGDNLQSQDQKLWEGDSQFELLDSQQLAEGLALCDEFLLSQSQTSCGGGDEPRETKPCLAAYAHLSAEDFKKDLECQRLEPTDNTNLELDNTDEFRLSQIVWFRYHQLPSLK

SEQ ID NO: 80990 - protein, 722 aa, Zea mays
  Coding DNA Sequence Number=SeqID_39211
  Homolog annotation: Hit_ID=Q5Z9V2; Match level="QueryCoverage=33%, HitCoverage=100%, E-value=6e-74, Identity=63%"; Hit description =Putative NAM1 protein
  Pfam annotation: Domain name=NAM; Domain location=368-507; Score =111.3; E_value=2.8e-30; Accession=PF02365.6; Description=No apical meristem (NAM) protein
MVFIVRQYSLTLRSPWTKVSTMLSRRTHAAVGATPAGSQIGLGIRSIRDDRNHEANVLDTPSLKVELSHERVSRVMPQHRGDGEELFRRGNLSSDSISGLAFALPHESGFPQTGLSRRVLRTGSSQGGDGGSLVGDRWRGRRRINDRRRGDWRGRVLRTGNPRRRGICHSRKDRCGARRGEGPSGGNGPCPPRRPKHSSSGRRDGGGSTKRRGPYPGREGRELGIHGRREDPGALAALGGVWSGGTEAGRAGARTWALLAGAARLLAALAWDRGRAGPGEQSGALAALPCARRGRGRVGPPKAGRGGQSGAPGRSGWVRPLAGAAAGAGGAPGRDDGSREGRWRLHREGRWNPWLDTMSQVVHQWPGLPKGVKFDPSDQELIWHLMAKHGKSGIKPHPFIDEFIPTVEEDEGICYTHPQKLPGVKQNGSVSHFFHRTFKAYNTGTRKRRRINTDDADVRWHKTGKTKPVLVDGKHLGCKKIMVLYISPLKGGKAEKTNWVIHQYHLGTGEDERDGEYVVSKLFFQQQFKPGDKNAQELTTSDDLESMAAESNLPDFTTLPTDKHVGTVQEVVHNPEHNLYQLNRNCEISIEETVVLPPSVKTTKDGDNLQSQDQKLWEGDSQFELLDSQQLAEGLALCDEFLLSQSQTSCGGGDEPRETKPCLAAYAHLSAEDFKKDLECQRLEPTDNTNLELDNTDEFRLSQIEFSQDSFMTWAAEKITDD

SEQ ID NO: 80991 - protein, 118 aa, Zea mays
  Coding DNA Sequence Number=SeqID_39212
  Gene Ontology: Biological process=transcription
  Homolog annotation: Hit_ID=Q6H8E1; Match level="QueryCoverage=62%, HitCoverage=6%, E-value=3e-22, Identity=67%"; Hit description=PHD finger protein-like
MRSCCQILSEYHRKLEWKEGDLDFVFVALARICLEDQDENHLEKADLMQELILDDMTDTVNLPPIPSLDEFMQGLDSEPPFVDLSVGTPQEDVNDSEEPDATMEPEDLPETEDNASTP

SEQ ID NO: 80992 - protein, 225 aa, Zea mays
  Coding DNA Sequence Number=SeqID_39213
  Gene Ontology: Mol. function=phosphoprotein phosphatase activity; Cellular component=nucleus
  Homolog annotation: Hit_ID=Q2QM47; Match level="QueryCoverage=65%, HitCoverage=18%, E-value=1e-55, Identity=61%"; Hit description =Serine/threonine-protein phosphatase BSL2 homolog
MDRKEDGPGSRCGHTLTTVPATGEEGSLGYVGPRLILFGGAIALEGNSATPPSSAGSSRIRLAGANADVHCYDVLSNKWTRLTPLGEPPSPRVAHVATAVGTMVVIQSGGSRSWYWSTVWTCDGLGKRPLTDVWAFDTVAKPYEWRKLEEHATMIHQGLDSKPPFVDLSVGTPQEDVNDSEELDTTMEPEDLPETKDDASATEKFESKSVKSSTHVNSDNFVGDV

SEQ ID NO: 80993 - protein, 323 aa, Zea mays
  Coding DNA Sequence Number=SeqID_39214
  Homolog annotation: Hit_ID=Q10NV0; Match level="QueryCoverage=57%, HitCoverage=95%, E-value=3e-55, Identity=61%"; Hit description =Expressed protein
  Pfam annotation: Domain name=DUF292; Domain location=21-142; Score =65.4; E_value=1.8e-16; Accession=PF03398.5; Description=Eukaryotic protein of unknown function, DUF292
  Subcellular localization annotation: CTP_CleavageSite=36; ConfidenceScore=5.15e-01
MGFFQGKTSKQTARVKKLLGLALSRLAIARRPRLARRSIYRSDVGQLLSLGYLHRALLRAERVIEEDNMLQAFDIIELCCKRLVEHAAHLDKPRECGEEIREAAAGIMFAARWCGDLPELQVARTILEDKFGSDMAVIAKEGTSIVDPMLVWKLSGDKTNMELKKKVTKEIAVENSFMVDFSELQLQKCHTRISGHKDPGANIINSEKGRVSPNLHRSSLNLRLGNFFPDRGRAAKRPRSLVEARSPVTGVTLPDVEAGHGTGRNSMEQAGIIRVATESLRMRWEVRAEEVAGRCGIRCRIRDSGEEDDYGAMGPPVGWRERE

SEQ ID NO: 80994 - protein, 142 aa, Zea mays
  Coding DNA Sequence Number=SeqID_39215
MANILRSRDPTLTLRSRSYCRDEFSEKGRVSPNLHRSSLNLRLGNFFPDRGRAAKRPRSLVEARSPVTGVTLPDVEAGHGTGRNSMEQAGIIRVATESLRMRWEVHAEEVAGRCGIRCRIRDSGEEDDSGAVGPPVGWRERE

SEQ ID NO: 80995 - protein, 98 aa, Zea mays
  Coding DNA Sequence Number=SeqID_39216
MGHKKKVGVELLAMGATAPCLGKKGAAEGGEAKGKGLRAHGGEEAMESGALDTIGLLAGGQDWLAWPALQAKHHATAMATAAHNKVYASGWGYKIRVS

SEQ ID NO: 80996 - protein, 241 aa, Zea mays
  Coding DNA Sequence Number=SeqID_39217
  Subcellular localization annotation: CTP_CleavageSite=63; ConfidenceScore=5.50e-01
MARHSVPTHINRPHRFPVSRSGLTALAYNASLTPTGRRAVTALVPTITGMGDLVSGRVRGRLPAAGGAGAEQRSLAGREGRLVMGGRASSRGSIRPGRNGASSWAGVSSATARAGNGAGMGRKSYCSCGKGHRKEADIELLAMGAAAPSWGRRAPPREVKPRGRGCAPMEERRSCCSPALGHSLLLARCAREAAMGGAVAGLAEISTNDENFGHQRSQGRGEFGLQPGRQPLELRPGRGSA

SEQ ID NO: 80997 - protein, 464 aa, Zea mays
  Coding DNA Sequence Number=SeqID_39218
  Pfam annotation: Domain name=zf-C2H2; Domain location=322-346; Score =6.5; E_value=2.1; Accession=PF00096.16; Description=Zinc finger, C2H2 type
  Pfam annotation: Domain name=zf-C2H2; Domain location=394-418; Score =1.8; E_value=6.7; Accession=PF00096.16; Description=Zinc finger, C2H2 type
  Pfam annotation: Domain name=zf-C2H2; Domain location=432-456; Score =11.8; E_value=0.55; Accession=PF00096.16; Description=Zinc finger, C2H2 type
  Pfam module annotation: Pfam domain module=zf-C2H2::zf-C2H2::zf-C2H2; Domain location=322-346::394-418::432-456
MNFNSTAAAVGKALPSSSARAHYLAPPHSATGHHEGVSAGYCCDLFQVPVHVLPFRPDGVHGIQASSISLPWTLPYRSSSHIINVYYELYLELHRGFVHQNMIWCELVETEHVMGFTAGNLNPVPYSHRITGVMVLLDAVDAALGSASPPAMPLWLQKLQGHAPEQTRQGNDAEHHQEGRSSGVRTHPFNGYFELCRSPSKQIPLAGKAGINQVRPLSGHQQGVVWEKIGVEVVHNMQPLHEIKNPSSEGRKAIDSGIEDCVKKPMHHRLQYKPVDQENAASNDQKSTEFNEPTAEGTSAGVKRKLTTPSSPVKKQKPLGQWSCTICQANPASQRQLEQHLAGKRHQSNVAALQPSQSNSSSPEPDTKATPARSRIIATNAQQDGKQDVPENRWTCTLCRAKCYTELNYYSHLGGLWHREKAQARREEHLRFYCSVCDLQCNSEKMLESHLGGRRHRETLEARD

SEQ ID NO: 80998 - protein, 141 aa, Zea mays
  Coding DNA Sequence Number=SeqID_39219
  Pfam annotation: Domain name=IQ; Domain location=34-54; Score=17.9; E_ value=0.037; Accession=PF00612.17; Description=IQ calmodulin-binding motif
MQATLQKVEQGLLQIKAAVQHEQHQLALSARLQTSAAVGIQAAARGFLARRGVWEMRRRMLEAALVTVDLGTRARDLALSDGHQQRHRAAISKCEHGTCPVGDELQLYGSDGREGTPLVIGKGALFSATTFRYRPPRGRLR

SEQ ID NO: 80999 - protein, 162 aa, Zea mays
  Coding DNA Sequence Number=SeqID_39220
  Gene Ontology: Mol. function=transferase activity, transferring glycosyl groups; Cellular component=membrane; Biological process =cellulose biosynthetic process
  Homolog annotation: Hit_ID=Q9LLI9; Match level="QueryCoverage=39%, HitCoverage=6%, E-value=5e-32, Identity=95%"; Hit description =Cellulose synthase-1
  Pfam annotation: Domain name=PHD; Domain location=66-114; Score=-2.1; E_value=0.092; Accession=PF00628.19; Description=PHD-finger
  Pfam annotation: Domain name=zf-C3HC4; Domain location=67-111; Score =1.7; E_value=0.1; Accession=PF00097.15; Description=Zinc finger, C3HC4 type (RING finger)
  Pfam module annotation: Pfam domain module=PHD::zf-C3HC4; Domain location=66-114::67-111
MPGFTPCSPRSDRDFDFPTDAGAVGLTGRDPSSHGRLLVWFADQNGDGAMLPLRRAKPTKSANGQVCQICGDSIGVSATSDVFVACNECAFPVCRPCYEYEREGNQCCPQCKTRYKRQKCWFPGNFFEWDYKDKDGVKGLCVVGAINNCTSQLPTYGRSSPP

SEQ ID NO: 81000 - protein, 155 aa, Zea mays
  Coding DNA Sequence Number=SeqID_39221
  Gene Ontology: Mol. function=transferase activity, transferring glycosyl groups; Cellular component=membrane; Biological process =cellulose biosynthetic process
  Homolog annotation: Hit_ID=Q9LLI9; Match level="QueryCoverage=41%, HitCoverage=6%, E-value=4e-30, Identity=93%"; Hit description =Cellulose synthase-1
MTAMRRARYIQPIQCRPRCLLQIQFLAAHVVCARLSLDLGRAMLPLRRAKPTKSANGQVCQICGDSIGVSATGDVFVACNECAFPVCRPCYEYEREGNQRYPQCKTRYKRQKCWFPGNFFEWDYKDKDGVKGLCVVGAINNCTSQLPIYGRSSPP

SEQ ID NO: 81001 - protein, 188 aa, Zea mays
  Coding DNA Sequence Number=SeqID_39222
  Homolog annotation: Hit_ID=Q2R575; Match level="QueryCoverage=28%, HitCoverage=5%, E-value=9e-23, Identity=94%"; Hit description =Phospholipid-translocating P-type ATPase, flippase family protein, expressed
  Pfam annotation: Domain name=Mito_carr; Domain location=136-188; Score=-6.1; E_value=0.013; Accession=PF00153.17; Description =Mitochondrial carrier protein
MTCGHDTIQQVDMLPQLQERLAVAIPSLHANKDIQVRCFMNQYFLLIACLQLWSLITPVNPASTWGPLIFIFAVSATKEAWDDYNRHNLTYALMTVVVQVTSLKGVYYYFYQIFRNRAEARALEQSRRRLGDGSVGMLQSLTIAALSGCVNVLLTNPIWVVVTRMQVITHPGLTVSMARAIIHRSWDQ

SEQ ID NO: 81002 - protein, 208 aa, Zea mays
  Coding DNA Sequence Number=SeqID_39223
  Homolog annotation: Hit_ID=Q2R575; Match level="QueryCoverage=25%, HitCoverage=5%, E-value=1e-22, Identity=94%"; Hit description =Phospholipid-translocating P-type ATPase, flippase family protein, expressed
MTCGHDTIQQVDKLPQLQERLAVAIPSLHANKDIQVRCFMNQYFLLIACLQLWSLITPVNPASTWGPLIFIFAVSATKEAWDDYNRHNLTSALMTVVVQVTSLKGVYYYFYQIFRNRAEARALEQSRRRLGDGSVGMLQSLTIAALSGNSPYMQLELGGIISSSFRKPDKHKAQTAETFIWGGQDSKREEKIDENSDSNPIEVQMQSG

SEQ ID NO: 81003 - protein, 242 aa, Zea mays
  Coding DNA Sequence Number=SeqID_39224
MAKKQEATARRRRVGILRAKGLSLLRRAHLATAEATPARSSPTPAIDHQPPPPPTHPGLTPRAIPPTGAPRASAVPLGSGALLLRPGARMQGWLLANFHSTATPGSVSPQNPAHLWLTPSSLLPHYNTHFVRNVANYLLSVHPDRLSVVCVRPWVFRVSVASQNIANVIVTRGPLVLASSVLIPHHSMGSAMLAIDCLARSSEVDDGVFNATQPPPPCAHVVVAHPLYWGRTLRDLQGYDFV

SEQ ID NO: 81004 - protein, 406 aa, Zea mays
  Coding DNA Sequence Number=SeqID_39225
  Homolog annotation: Hit_ID=Q6ZH91; Match level="QueryCoverage=34%, HitCoverage=23%, E-value=5e-49, Identity=70%"; Hit description =Putative pentatricopeptide (PPR) repeat-containing protein
  Pfam annotation: Domain name=PPR; Domain location=63-97; Score=31.4; E_value=3.1e-06; Accession=PF01535.11; Description=PPR repeat
  Pfam annotation: Domain name=PPR; Domain location=98-132; Score=8.6; E_value=0.72; Accession=PF01535.11; Description=PPR repeat
  Pfam module annotation: Pfam domain module=PPR::PPR; Domain location =63-97::98-132
MIRACCARRLADEALSLFKMMLADGVRPNRITYNTMVQGFCQAGRMELVKEVFGMDSFKPDTCTFNTLMAAHCREGRIQDAKKVFDQTMELRVRRDSASYSIVTRALCENGEFGRAEELVDSLLEELVDSHSLHLTIQFLSETIELLLLPVQLEKSCENQSRGHGLGGLKIGTAIRPLPLRRRSNPHRPQHAHMEAAASNMDHAPMEEDAAPASMVEMNAEELEVADILSDLSRLIRSRDPQERRRERRERHRRRLVQRDDNPSPEPAPAAASTAVPSPETPLAYPQSGGDDDAPPKDKGEAAAAVRPRDQSAEQQYGEEAAASSGQAPENARPLTVATRKKKDTPWTVPSRDLTDERLLEWAKTVEDRYLQAMAKKQKAAARRRRVGILRAKGLSLVSRRMWRAS

SEQ ID NO: 81005 - protein, 241 aa, Zea mays
  Coding DNA Sequence Number=SeqID_39226
  Gene Ontology: Mol. function=heat shock protein binding; Cellular component=integral to membrane; Biological process=protein folding
  Homolog annotation: Hit_ID=Q6H7N3; Match level="QueryCoverage=75%, HitCoverage=65%, E-value=1e-79, Identity=81%"; Hit description =Putative DnaJ homolog, subfamily C, member 9
  Pfam annotation: Domain name=SAP18; Domain location=5-142; Score =67.6; E_value=4e-17; Accession=PF06487.3; Description=Sin3 associated polypeptide p18 (SAP1
MARLRPEPIDREKTCPLLLRVFTRVAGHHQNEEFAVRGKEPKDEVQIYAWKDATLRELTDLALVGEAADNLQEYFRTMYKKVTEADIEEFEAKYRGSDSEKTDLKELYTKYKGNMNMLFCTMICSEPKLDSHRFKDIIDEAIGEGELKSTKVYEKWAKKISGMEPPTNPLERRAKKRKNSEENDLILAISQRKAERKKQFNSILSNIMSKCDSKASSSEPTEEEFEQAQQRPESRRAKRRK

SEQ ID NO: 81006 - protein, 241 aa, Zea mays
  Coding DNA Sequence Number=SeqID_39227
  Gene Ontology: Mol. function=heat shock protein binding; Cellular component=integral to membrane; Biological process=protein folding
  Homolog annotation: Hit_ID=Q6H7N3; Match level="QueryCoverage=75%, HitCoverage=65%, E-value=4e-78, Identity=80%"; Hit description =Putative DnaJ homolog, subfamily C, member 9
  Pfam annotation: Domain name=SAP18; Domain location=5-142; Score =67.6; E_value=4e-17; Accession=PF06487.3; Description=Sin3 associated polypeptide p18 (SAP1
MARLRPEPIDREKTCPLLLRVFTRVAGHHQNEEFAVRGKEPKDEVQIYAWKDATLRELTDLALVGEAADNLQEYFRTMYKKVTEADIEEFEAKYRGSDSEKTDLKELYTKYKGNMNMLFCTMICSEPKLDSHRFKDIIDEAIGEGELKSTKVYEKGAKKISGMEPPTNPLERRAKKRKNSEENDLILAISQRKAERKKQFNSILSNIMSKCDSKASSSEPTEEEFEQAQQRPESRRAKRRK

SEQ ID NO: 81007 - protein, 86 aa, Zea mays
  Coding DNA Sequence Number=SeqID_39228
MAMMDSTAEKMYLCQKESLGVVSPSESIKDRLDVGLLTEDPLTGHMPRHGIHFSKHFCKTESLNIEKPYLDSHITSIPLRVFSLVG

SEQ ID NO: 81008 - protein, 175 aa, Zea mays
  Coding DNA Sequence Number=SeqID_39229
MAMMGPTSEKMYLCQKESLGVVSPSESIKDRLDVGLLTEDPLTGHMPRHGIHFSKHFCKTESLNIEKPYLDSHITSIPLRVFSLVGVYVIRFRISSSPMFCNVYKMGETFLVGRGGGSSEVEVESVIRGQGRVRAPGSGERIPSAEARAEFEPWVGRRSSSSSGAEPSPSPGVGE

SEQ ID NO: 81009 - protein, 239 aa, Zea mays
  Coding DNA Sequence Number=SeqID_39230
MPPRTRLTARKSTGPIGVPRHQLAPRHESSSSGSNDPIGDLEARVSRLQAALQHRTDAWVADGDRINELRRDIRHLQDQLADRDLALDWAVQSRLLMCAKEARAQARVKELSSTVDNLQVYCNTLHEEVHILYSQLHPSEPAPPAEAEAGPSHVAGRALGGELDLFEPPPSLSRAHGYERPRELQRLVILDQRYFGTGGNETDGSGYDYGIGCQHCNHCSGEDEAVEGDFQEFQDYDEF

SEQ ID NO: 81010 - protein, 318 aa, Zea mays
  Coding DNA Sequence Number=SeqID_39231
MAMMGPTSEKMYLCQKESLGVVSPSESIKDRLDVGLLTEDPLTGHMPRHGIHFSKHFCKTESLNIEKPYLDSHITSIPLRVFSLVGVYVIRFRISLSPMFCNVYKMGETFLVRILLITFSPLEKMPPRTRLTARKSTGPIGVPRHQLAPRHESSSSGSNDPIGDLEARVSRLQAALQHRTDAWVADGDRINELRRDIRHLQDQLADRDLALDWAVQSRLLMCAKEARAQARVKELSSTVDNLQVYYNTLHEEVHILYSQLHPSEPAPPAEAEAGPSHVAGRALGGELDLFEPPPSLRLVDVWTPTPDDEAAKTDGKQE

SEQ ID NO: 81011 - protein, 361 aa, Zea mays
  Coding DNA Sequence Number=SeqID_39232
MTPVALSPLRQQGDVSRILAALPAVLLQGLGTSPTATLPRVQGLKLSPDSHDGMFLSRENGISICRLVSEQAKKSVATAIVPEEVDTGSPYDVEILDSPTNPKKRKLLHVLDDSEVVFEDEEDPITQADLQRWFVDNWDKRTPVKVSTDGCTNDFLMGGLSTKDMPVTKADLIDVLCDYIMAIQDDTTLECFDMAVRLLTNKEAHRLKGEIIKNIKHYMDIRFWRMVDFGKLPKYHQDPTAEELAKTLDCWPSMNYYITGCRYVSSYAMEIHECHTLFVIDHVKKHVTFIDFTPTQDWYKHMSYRRLNTSYLMLQAMTMWGNNRRIEFIRKAKILRMNFVIDLLSYEDNLCRCIIPANIQQ

SEQ ID NO: 81012 - protein, 167 aa, Zea mays
  Coding DNA Sequence Number=SeqID_39233
  Homolog annotation: Hit_ID=Q6QP51; Match level="QueryCoverage=63%, HitCoverage=53%, E-value=2e-14, Identity=48%"; Hit description =Putative growth-regulating factor 1
MTGKQRRLPRSDCRANHPGEADNKSQSTTEFSLWRNRKLRLAQPQAPASGGGLRLARPPDSASTSASRGIASSPDPSLGLKRSLHLARPWARTDRANRGYIVTLSLASSGYKEQDRRPIWLTPATGNDGAPRATMTSVALSPLRQQGDVSRILAALPAGLLQGSGER

SEQ ID NO: 81013 - protein, 132 aa, Zea mays
  Coding DNA Sequence Number=SeqID_39234
  Homolog annotation: Hit_ID=Q5EUD0; Match level="QueryCoverage=38%, HitCoverage=9%, E-value=1e-19, Identity=90%"; Hit description =Protein disulfide isomerase
  Pfam annotation: Domain name=UIM; Domain location=97-114; Score=17.8; E_value=0.039; Accession=PF02809.10; Description=Ubiquitin interaction motif
MGSVVAFAKLDEERYPKAATAVGVKGFPTVLLFVNGTEHAYHGLHTKNAIIIFKNFEDLLPYLDKGPKGHHVAQPQKRPRKVDQEASTGKQGKIAIEDEDEELARAIAASLEVVIEASDASDDDMAEAEPED

SEQ ID NO: 81014 - protein, 543 aa, Zea mays
  Coding DNA Sequence Number=SeqID_39235
MHRVFPPFEPPDGGRPRFFRLVVVGGTQLRGSWYLSAIIWLQGFSSGSPAASPRRWSPKTVTTSSMVGRSKLGCGLCPSLSFKDFHHPCWGGERGKPRRAGGLPPRGSVTLFFPRRLGEKGILQPRGGFLQPRRGRRTAAAQPGCSILSSVRAMVVPRAGRPRPGLPRADNRARGSPSTSRAARAALIFWGGSGEGGSEDLPVRFGAPGARWCGVEVVAAGKGFSADEIANSACTPGPPSPDLNGWFSSFVGESPSAAASARKPLLQLFRRPGRRSLSLLLERASASHQGFCRPAGPPTWGVESLGSVGLATRGFSCLVKGNPRPLFDEQEPEAAVSAWTEAELARKEDFVGRSLTGPSTGRTGAGVELPRPWAGLMSLGDSWLRLRSDRPSRLLKPDSWRRPWRRWPGRGADVVLRSGDPPTVLPFEARSDFAEGGVDAKGVAAPPPSRIVCPSESYFSRKVMSEDSANDVVEKARKIVLAERSPSIKTCSVSGIAYPSVSYLSQKVMSEDPTFEVVKKYERRSGRKTFSEENFDTKGVPPF

SEQ ID NO: 81015 - protein, 113 aa, Zea mays
  Coding DNA Sequence Number=SeqID_39236
  Subcellular localization annotation: CTP_CleavageSite=27; ConfidenceScore=5.04e-01
MAERYRLMRSCVPPTTTRRENRGRPPSGGSKGPPPTTWGLGPTRHASWRTADRAKPPLTVRATAQRLRAFLHSRPGQRVKGRAAMQAACNHTQGDVPFRLRHIQHGGPGPHVM

SEQ ID NO: 81016 - protein, 48 aa, Zea mays
  Coding DNA Sequence Number=SeqID_39237
MVCMGDLISLCGFGTVMPPKSKKSVKGLFKGLGLFRAVLRAAADVESC

SEQ ID NO: 81017 - protein, 171 aa, Zea mays
  Coding DNA Sequence Number=SeqID_39238
  Subcellular localization annotation: CTP_CleavageSite=41; ConfidenceScore=5.28e-01
MVCMGDLISLCGFGTVMPPKSKKSVKGLFKGLGLFQGSSSSSSRRRELLSMVHGDEDEQHTEEQHIEEEEHNEAEQHNEEVEHNEEVEHVTWDQAAQHHQPWDQWDHQREQQQAWEQWGQQGEPADNLMDDGSGGSSATRTRRSRKSHSVKPRHAIEREADRTLIMPHGDR

SEQ ID NO: 81018 - protein, 932 aa, Zea mays
  Coding DNA Sequence Number=SeqID_39239
  Gene Ontology: Mol. function=inositol or phosphatidylinositol phosphatase activity; Cellular component=intracellular; Biological process=abscisic acid mediated signaling
  Homolog annotation: Hit_ID=Q5VRY7; Match level="QueryCoverage=56%, HitCoverage=83%, E-value=1e-161, Identity=57%"; Hit description =Putative inositol polyphosphate 5-phosphatase
  Pfam annotation: Domain name=Exo_endo_phos; Domain location=146-637; Score=144.8; E_value=2.3e-40; Accession=PF03372.13; Description =EndonucleaseExonucleasephosphatase family
MVVQKQRRVPAEVFWPKVVLKKWLNLKSKDLDLGASLAADYDDDDDGSDVDGQGTYGHGWPPRPHLRRRVSVPGSPYLRPFRCPARGPETASFSSLSPHFLLPRFAPPENCGCDDGGGGGGARRPDDDGDGAQITGEYINTKELRVCVGTWNAGGKAPPNDLDIAEWLGTGGDAEPADIYVLGFQEVVPLNASNVFGAEDGRPARAWESVIRGALRQAQPPAPRYRCYSHPPSPSRFEPPIGAAEELLPGGTDTETDTDEDVPLGDPVAAATPTPRKLSRLNHFSVVVGENENGSSELNGDELDDGPDQPPQQLSLQQRALLRSLSRADRVGVLWPEQPLDLLPASSASASASASFRASKSFSRAAYRSSFRGSSRVAADVVDDLPMIPDLDLDGALRKKGRSPFVRIVSKQMVGIFLTVWVRRGLRKCVQSLKVSTVGVGAMGYIGNKGAVSVSMSVYQTMFCFVCSHLAAGEKPGDVHKRNADVHEIHRRTRFAAPGDLQLPRNIHDHDRIFWLGDLNYRLDASYERAHELISAGSWRELAETDQLKRELRKGRAFDGWTEGVLEFAPTYKYELGSRRYVGVGDHQGQSQSQRGGGRRTPAWCDRVLSYGKGLRLLGYRRSELALSDHRPVTATYAAEVEVFSSRKLQRALTLTDAEASRMPHQALGDTAIYPSPTYLPTSSIDIHATIAKAAELHAVLLQGGSAAASIVGAYASARQSLALICLQPAASRVLTITRSGLLAMAIEDYPVFALINPKAAESLADPSEYPNLFEDWQVALTVEKSVASQRGNYLPADQYDARVPLDTVFTASVMKMYLKYESPEVLANECRRPLCPAPLFDGLHAQFLLLLPFYLSRHHLQDEAATVPCRGAHLEYQEHHVHPVGQEYRDRQGHCCHCEQRLEQYVHDLPVPVTQQSAQPPPDVVCFLCFL

SEQ ID NO: 81019 - protein, 247 aa, Zea mays
  Coding DNA Sequence Number=SeqID_39240
  Homolog annotation: Hit_ID=Q9FJB4; Match level="QueryCoverage=39%, HitCoverage=25%, E-value=2e-32, Identity=71%"; Hit description =Arabidopsis thaliana genomic DNA, chromosome 5, P1 clone:MOK9
METGITGYKVVTMLTLLSSIKGSVEAFSKLLAGSQPTRKKNIVPCINDCLIYINVLWMVELDSEFVYKNSCHGVVCLLFCILPTCISWVHESLFPTGSSNCWYSRIPNILDPNIEPNFPMKKHKTQCLSYELFVRELSKKAQKANNIWWRLSGLLGDRNRQVMYILLQALFTVATMALTVPIFLSYWMHVVFLILKVCASTWNGGSFILEVMPRQVERKQQKKLGMKPIEQGSWTQGAPTFICQHFW

SEQ ID NO: 81020 - protein, 432 aa, Zea mays
  Coding DNA Sequence Number=SeqID_39241
  Pfam annotation: Domain name=Extensin_2; Domain location=19-350; Score=-141.0; E_value=0.087; Accession=PF04554.4; Description =Extensin-like region
  Pfam annotation: Domain name=zf-CCHC; Domain location=212-229; Score =11.8; E_value=0.011; Accession=PF00098.13; Description=Zinc knuckle
  Pfam annotation: Domain name=zf-CCHC; Domain location=231-248; Score =17.9; E_value=0.0011; Accession=PF00098.13; Description=Zinc knuckle
  Pfam module annotation: Pfam domain module=Extensin_2::zf-CCHC::zf -CCHC; Domain location=19-350::212-229::231-248
MEDEAPVLDKEGSGILGPASGLRMALVSPAPAPSAPDAPSPPQHQQAPVPIPGPAANSQAAVAAASSSPGASASIPSLSPPVSHATKGRSKSVRWGDLSPASSDGATSFDSRPSFKDVLVRTANPSPPGRVAAQGSVPAAGKSSALGKVYRQPHPLSTKRRSPKQATQPTPAIRPAPGLSDHGWTTVESKKGRSRRLKASWLPGRVPADLVGRCFNCLGCDHRAADCGSEPRCFLCSALGHKSSSCPKASVWRRLGCPRPVKSVWERLSPAVEGRVQRPARRRPVWQRIAPPEVIPVVPSVPVGNMLGVSAAQGNGGPASSRRKRWRKKKRKEREDKPALEISAPPPPEQMLPASDETACVIDWSVQMSIAEDNLKTAGVITVVSSRDVSADEIALVLAPRLEMEVGGLVLRQFSQSSFLAVLPNQVQLDTL

SEQ ID NO: 81021 - protein, 681 aa, Zea mays
  Coding DNA Sequence Number=SeqID_39242
  Pfam annotation: Domain name=Extensin_2; Domain location=83-429; Score=-137.5; E_value=0.063; Accession=PF04554.4; Description =Extensin-like region
  Pfam annotation: Domain name=zf-CCHC; Domain location=291-308; Score =11.8; E_value=0.011; Accession=PF00098.13; Description=Zinc knuckle
  Pfam annotation: Domain name=zf-CCHC; Domain location=310-327; Score =17.9; E_value=0.0011; Accession=PF00098.13; Description=Zinc knuckle
  Pfam module annotation: Pfam domain module=Extensin_2::zf-CCHC::zf -CCHC; Domain location=83-429::291-308::310-327
MDSEVSGNGGGGGGGGRVDGPASDSDMEDEAPVLDKEGSGILGPACQPRNGTEKRRVMITNCFPGGGAPDGFKAASLVVQDDYEEKENILAEKGLATQLGYEWLSSLPPPAPSAPDAPSPPQHQQAPVPIPGPAANSQAAVAAASSSPGASASIPSLSPPVSHATKGRSKSVRWGDLSPASSDGATSFDSRPSFKDVLVRTANPSPPGRVAAQGSVPAAGKSSALGKVYRQPHPLSTKRRSPKQATQPTPAIRPAPGLSDHGWTTVESKKGRSRRLKASWLPGRVPADLVGRCFNCLGCDHRAADCGSEPRCFLCSALGHKSSSCPKASVWRRLGCPRPVKSVWERLSPAVEGRVQRPARRRPVWQRIAPPEVIPVVPSVPVGNMLGVSAAQGNGGPASSRRKRWRKKKRKEREDKPALEISAPPPPEQMLPASDETACVIDWSVQMSIAEDNLKTAGVITVVSSRDVSADEIALVLAPRLEMEVGGLVLRQFSQSSFLAVLPNQVQLDTLVDRFHIIREENFMLSSRRWTRFRGAVGNSLKHLVELEIRGLSLHAWETSVVQHLINLHACISQVLPDTLEIRNLEVFRCLAWCCDPEHIPSKKDLWITEPDQASVAEGKKALVYPVQIRWGPADLNLIPGAPQPPVGAGDQDKPDTPLHGEDVVTTLHPLNMLQPLKTPT

SEQ ID NO: 81022 - protein, 190 aa, Zea mays
  Coding DNA Sequence Number=SeqID_39243
MGKPVPSLLMLFLSRGRVPLNSPTRWLCIKPGLAFQSSGRQVLWCRLGCWIWGYLLSSSLLRHEDVLSVSKITVYRNAMNIPSPYANSNRGKEKDGAAYRRRGRSGEGWGWLGETLAVTSRYGSTSEMAGIARSTRTGGCPRRRRVYRPNHGELVQSEGMVSFTGSRSDCVHKESKDGGVVYPVHVLRRG

SEQ ID NO: 81023 - protein, 340 aa, Zea mays
  Coding DNA Sequence Number=SeqID_39244
  Subcellular localization annotation: CTP_CleavageSite=49; ConfidenceScore=5.05e-01
MGKPVPSLLMLLLSRGRVPLNSPTRWQGGRPSYPSNHLLQRTCKNYATSKAEYTNTQLDLPGKGAHRLGVQCLTDPDWPSCSDRTCTHHNRNGRPRLRSREEGNLRAGSLRLCIKPGLAFQSSGRQVLWCRLGCWIWGYLLSSSLLRHEDVLSVSKITVYRNAMNIPSPYANSNRGKEKGGAAYRRRGRSGEGWGWLGETLAVTSRYGSMSEMAGIARSTRAGGCPRRRRVYRPNHGELVQSEGTVSFTGSRSDCVHKESKDGGVVYPVHVLRRGRELRRAWTGFSGEALSDSLLGEPHGGVHSLLRGLDEVGNGSNGRSMVAEGLGGRGLAVHGQTATS

SEQ ID NO: 81024 - protein, 312 aa, Zea mays
  Coding DNA Sequence Number=SeqID_39245
  Gene Ontology: Mol. function=protein serine/threonine kinase activity; Cellular component=beta-catenin destruction complex; Biological process=protein amino acid phosphorylation
  Homolog annotation: Hit_ID=Q53VM1; Match level="QueryCoverage=92%, HitCoverage=90%, E-value=1e-68, Identity=61%"; Hit description =Ser/Thr protein kinase
  Pfam annotation: Domain name=Pkinase; Domain location=143-287; Score=- 44.6; E_value=6.6e-06; Accession=PF00069.15; Description=Protein kinase domain
  Pfam annotation: Domain name=Pkinase_Tyr; Domain location=143-287; Score=-139.8; E_value=0.00068; Accession=PF07714.7; Description =Protein tyrosine kinase
  Pfam module annotation: Pfam domain module=Pkinase::Pkinase_Tyr; Domain location=143-287::143-287
MESMWPRSGWKEKQWRNPPATQGGDSGSKRPKFEQDGAGDIVIEPHLTEAKPVRIDQESSSSSNRDAEASTSTSMKPVKTEEPVADLLPKELNDMTISDDKADDHNDKEGEGVTLDGNGAETGQIIVTTIGGHNGKPKQKVSYMAERVVGTGSFGIVFQAKCLETGETVAIKKVLQDKRYKNRELQTMQLLDHPNVVQLKHHFFSTTQRGEVYLNLVLEFVSETVYRVAKYYNRMNQRVPILYVKLYAYQLFGKRMPPEAVDLVSRLLQYSPNLRCTAVDACAHPFFDELRDPKVCLPSGRPLPALFDFTAA

SEQ ID NO: 81025 - protein, 422 aa, Zea mays
  Coding DNA Sequence Number=SeqID_39246
  Gene Ontology: Mol. function=protein serine/threonine kinase activity; Cellular component=beta-catenin destruction complex; Biological process=protein amino acid phosphorylation
  Homolog annotation: Hit_ID=Q53VM1; Match level="QueryCoverage=96%, HitCoverage=90%, E-value=1e-166, Identity=67%"; Hit description =Ser/Thr protein kinase
  Pfam annotation: Domain name=Pkinase; Domain location=125-390; Score =251.7; E_value=1.6e-72; Accession=PF00069.15; Description=Protein kinase domain
  Pfam annotation: Domain name=Pkinase_Tyr; Domain location=125-390; Score=-36.6; E_value=3.2e-10; Accession=PF07714.7; Description =Protein tyrosine kinase
  Pfam module annotation: Pfam domain module=Pkinase::Pkinase_Tyr; Domain location=125-390::125-390
MGLRGGDSGSKRPKFEQDGAGDIVIEPHLTEAKPVRIDQESSSSSNRDAEASTSTSMKPVKTEEPVADLLPKELNDMTISDDKADDHNDKEGEGVTLDGNGAETGQIIVTTIGGHNGKPKQKVSYMAERVVGTGSFGIVFQAKCLETGETVAIKKVLQDKRYKNRELQTMQLLDHPNVVQLKHHFFSTTQRGEVYLNLVLEFVSETVYRVAKYYNRMNQRVPILYVKLYAYQMCRALAYIHRVVGVCHRDIKPQNLLVPGEPNISYICSRYYRAPELIFGATEYTTAIDIWSVGCVVAELLIGQPLFPGESGVDQLVEIIKILGTPTREEIRCMNPNYSEFKFPQIKAHPWHKLFGKRMPPEAVDLVSRLLQYSPNLRCTAVDACAHPFFDELRDPKVCLPSGRPLPALFDFTAAGNFSIYT

SEQ ID NO: 81026 - protein, 76 aa, Zea mays
  Coding DNA Sequence Number=SeqID_39247
  Subcellular localization annotation: CTP_CleavageSite=56; ConfidenceScore=5.24e-01
MVRVACTLRGKRLDGGVSVLSVGVNPVRKQQTFAVFVQRWYPRMSPNSEIRRGRMLASHFKNNTLLSGRVFCLLGL

SEQ ID NO: 81027 - protein, 104 aa, Zea mays
  Coding DNA Sequence Number=SeqID_39248
MARVECTLHGKRLDGGVSVLSVRKQQTFAVFVQRWYPRMSPNSEGYRGRMLASHFKNNTLLCSYCNLLPLILSFNVMYNICVTGEALLGEMMKDCPRSLGQGQL

SEQ ID NO: 81028 - protein, 424 aa, Zea mays
  Coding DNA Sequence Number=SeqID_39249
  Homolog annotation: Hit_ID=Q10LS6; Match level="QueryCoverage=22%, HitCoverage=41%, E-value=1e-10, Identity=34%"; Hit description =Reticulon family protein, putative, expressed
  Pfam annotation: Domain name=Reticulon; Domain location=258-424; Score=24.5; E_value=2.1e-08; Accession=PF02453.8; Description =Reticulon
  Subcellular localization annotation: CTP_CleavageSite=96; ConfidenceScore=5.64e-01
MAAPSFCALCARCVLLSARFQASAPSSAMAALLLFPAASSPVSHGRRLAFCSPRMRAGCQVFSLLPARALPCRVFLQLGPRPSSLLGSTVSSGSLVAEHIPCAHAFSIQFLEHLGLDQRLQSKVVVIPRVSKKSQESGEDGASSVVFTKCATKSSNKSSIVILVYAKPQAVKTLWCWPRVTSSTKRNPTGIWSRMETVCLARQTCVINDVNQKPSSCLRLSRRISQGSGWICGELPWDMVFDLVVFVQVQNIYTRTPKKKSAKDLAEDRLVYPLAENMSISPSSLGACPFHLHHISNHVLSGHNPFSAKERLGFTLPVSDVIVEKVADHALVWINRLLAIDHDIAIKRDRKVSTKGILILWVVSFIGMLFNFLTLIYIGVMLSLLVPPLYEKYQDEIDQKVGVAHSVLSRHIDTIITRTRQSTK

SEQ ID NO: 81029 - protein, 203 aa, Zea mays
  Coding DNA Sequence Number=SeqID_39250
MGDRGTRGWEEERRGHGRAGRRSLKPSRGEHAARAQSTEAGRGHGQTSGSFGGWARGEEKERSAGSFCRRAGRVEDGRDVGFGRRAAELSNSGHGRPEKKGLGWGGKSELGRGSIRARRAGILGRAWGAGALGKGPRRAGAWSFGTAWAHGRSSRERGAPPWASWSADRGQQEGDEAEETAQRPGELGDRGIGAGRGKTCAAR

SEQ ID NO: 81030 - protein, 51 aa, Zea mays
  Coding DNA Sequence Number=SeqID_39251
MKEKDFQGYDGLWESRVNGTERDCESGMGTKRLYPVDFLERNGSGSEENIP

SEQ ID NO: 81031 - protein, 66 aa, Zea mays
  Coding DNA Sequence Number=SeqID_39252
MYYSARLQFSRALCALVGMRTCLPESARHQGVNGTERDCESGIGTERLHPVDFLERNDSGSEENIP

SEQ ID NO: 81032 - protein, 68 aa, Zea mays
  Coding DNA Sequence Number=SeqID_39253
MAQGHISLSHTQESTKQFKEITPSTPYLVTFTRVNGTERDCESGMGTERLRPVDVLERNGSGSEENIP

SEQ ID NO: 81033 - protein, 84 aa, Zea mays
  Coding DNA Sequence Number=SeqID_39254
MTLEQATSTAHGDGANALTTHEVQVHCFCFVRIWGWGAWFHPKLLNFSRVNGTECDCESGIGTERLRPVDFLERNGSGSEENIL

SEQ ID NO: 81034 - protein, 84 aa, Zea mays
  Coding DNA Sequence Number=SeqID_39255
MTLEQATSTAHGDGANALTTHKVQVHCFCFVQIWGWGAWFHPKLLNFSRVNGTECDCESGIGTERLRPVDFLERNGSGSEENIL

SEQ ID NO: 81035 - protein, 68 aa, Zea mays
  Coding DNA Sequence Number=SeqID_39256
MALAPVLLYSARGSRAFLLSCLAVAGGREGGGAVNGTERDCESGMGTERLRPVDFLERNGSRSEENIP

SEQ ID NO: 81036 - protein, 94 aa, Zea mays
  Coding DNA Sequence Number=SeqID_39257
MEVGVWAVCLGVGLLAFHRCGAIGASRVGDGGGGMAAPGAYTLFLISSREEVTILHQYRVNGTERDCESGMGTERLRPVDFLERNGSGSEENIP

SEQ ID NO: 81037 - protein, 63 aa, Zea mays
  Coding DNA Sequence Number=SeqID_39258
MAAPPPGERADEDGPRVSDNERGDGSVRVNGTERDCESGMGTERLRPVDFLERNGSGSEENIL

SEQ ID NO: 81038 - protein, 710 aa, Zea mays
  Coding DNA Sequence Number=SeqID_39259
  Gene Ontology: Mol. function=methionine-tRNA ligase activity; Cellular component=cytoplasm; Biological process=tRNA aminoacylation for protein translation
  Homolog annotation: Hit_ID=Q9ZTS1; Match level="QueryCoverage=92%, HitCoverage=98%, E-value=0.0, Identity=74%"; Hit description =Probable methionyl-tRNA synthetase
  Pfam annotation: Domain name=tRNA-synt_1g; Domain location=20-378; Score=488.0; E_value=1.1e-143; Accession=PF09334.1; Description=tRNA synthetases class I (M)
  Pfam annotation: Domain name=tRNA_bind; Domain location=520-615; Score=173.6; E_value=4.9e-49; Accession=PF01588.10; Description =Putative tRNA binding domain
  Pfam module annotation: Pfam domain module=tRNA-synt_1g::tRNA_bind; Domain location=20-378::520-615
MASPSSSPPPKLPIPGRRNILITSALPYVNNVPHLGNIIGCVLSADVFARYCRLRGYNALYICGTDEYGTATETKAMEEECSPKEICDKYHAIHSEVYKWFDIEFDKFGRTSSPQQTTICQAIFHKLMENNWLSENTMQQLYCDTCQRFLADRLVEGACPTEGCTNKAARGDQCDNCSHMLNPTELIDPKCKVCKNTPHIRETDHLFLDLPRIEDKLVNYINDTSVAGMWSQNAIQATNAWLKEGLKSRCITRDLKWGVPVPIEKYKDKVFYVWFDAPIGYVSITSSYTPEWERWWKNPDNVELFQFMGKDNVPFHTIMFPSTLLGTGENWTMMKTICVTEYLNYEGGAGYDSIIPDAPGAESHPSTSVIAEKVSKSVEQYLDAMEKVKLKQGLKSAMGISTDGNRYLQKKIFLSVKKNGESVKAKPPWDLVPAGHKIGRPVPLFEELKDEKVSEYREKYAGSQAERNSKAVADAEATKIANQTQSIALSGGSKKEQKKQSGNSKSKVAEAELSVAKLEIRVGLIRKAEKHPDADSLYVEEIDVGEEAPRTVVSGLVKYIPLEEIQNRKVCVLCNLKPVVMRGIKSDAMVLAASNEDHTRVELVEPPADAAVGERVTFAGHSGETEASLSGKSKVWEKLAADLRSNGDLVACYQDVPFMTSAGVCKNSSKYSSFIVNGTERDCESGMGTERLRPVDFLERNGSGSEKNIP

SEQ ID NO: 81039 - protein, 136 aa, Zea mays
  Coding DNA Sequence Number=SeqID_39260
  Gene Ontology: Mol. function=ion channel activity; Cellular component= spliceosome; Biological process=RNA splicing
  Homolog annotation: Hit_ID=Q6YTU8; Match level="QueryCoverage=65%, HitCoverage=20%, E-value=5e-45, Identity=100%"; Hit description =Putative potassium channel regulatory factor
  Pfam annotation: Domain name=Prp18; Domain location=1-67; Score=75.4; E_value=1.8e-19; Accession=PF02840.6; Description=Prp18 domain
MDQYIKLAIGNAPWPIGVTMVGIHERSAREKIYTNSVAHIMNDETTRKYLQSIKRLMTLCQRRYPALPSKSVEFNSLANGSDLQALLSEENGSACKSGNRVQHHQQQIHQPPVENGQGQTVRTRGADRPRSAEREQ

SEQ ID NO: 81040 - protein, 143 aa, Zea mays
  Coding DNA Sequence Number=SeqID_39261
  Subcellular localization annotation: CTP_CleavageSite=33; ConfidenceScore=5.22e-01
MPPPPLATAIKTAPPGPPGSSWGSGGSGANTKRCRSGRGGPHYPDGCHSLNDDDVVEYTALQETKAAILREWEVLEAEHQRLSDWRTQLEERTKAVSRQFAFKRSELERDRKDYRKDLQKVFARELEVTQKEKRLAKKSAKCV

SEQ ID NO: 81041 - protein, 145 aa, Zea mays
  Coding DNA Sequence Number=SeqID_39262
MNPRTETVAAHLRCGHGGGGEDGGVENRDAAAEELNGGVLCTVLVQAFGRGHGAPISAPRSPGTGGALCGGHATFPRAWCRGMEGGEKSDRKTTVMIAWVLERKGDLLVWPGLWSEVVPGRGEFGGLFAPFSDGCRRRKRDRGSQ

SEQ ID NO: 81042 - protein, 274 aa, Zea mays
  Coding DNA Sequence Number=SeqID_39263
  Subcellular localization annotation: CTP_CleavageSite=24; ConfidenceScore=5.65e-01
MDTSSDTDSRSGYCTSTRTFHIMRAPSFSPSSDVSFIFPTFTLFFLPNLLPPPTVAAVSRPMLVDAGTARVGHALGLSLCVPSRRTWWRLPRLGYLIDEEFRARSVATVGICYRVGGGSVSLRRVQGWKTLAFSRPSRMDARCGHGGGGEDGGVENRDAAAEELNGGVLCTVLVQAFGRGHGAPISAPRSPGTGGALCGGHATFPRAWCRGMEGGEKSDRKTTVMIAWVLERKGDLLVWPGLWSEVVPGRGEFGGLFAPFSDGCRRRKRDRGSQ

SEQ ID NO: 81043 - protein, 129 aa, Zea mays
  Coding DNA Sequence Number=SeqID_39264
  Gene Ontology: Mol. function=ATP-dependent helicase activity; Cellular component=nucleus; Biological process=mRNA processing
  Homolog annotation: Hit_ID=Q6K4U8; Match level="QueryCoverage=85%, HitCoverage=9%, E-value=9e-28, Identity=63%"; Hit description =Putative RNA helicase
GVKFSFALCNENSLPHLLFSGTLCLVHTIESDAALIMVLQIHLTEPEGDILLFLTGQEEIGHACEPLHERMKPFGGDILELIIFHVYSALPNEVQSKIIEPTPVKRKVVVATNKQLANELHEISKLSIL

SEQ ID NO: 81044 - protein, 161 aa, Zea mays
  Coding DNA Sequence Number=SeqID_39265
  Gene Ontology: Mol. function=ATP-dependent helicase activity; Cellular component=nucleus; Biological process=mRNA processing
  Homolog annotation: Hit_ID=Q6K4U8; Match level="QueryCoverage=68%, HitCoverage=9%, E-value=1e-27, Identity=63%"; Hit description =Putative RNA helicase
MVASVMAPIISLRDFGTGIVPRLFPEGGGIGLGVKFSFALCNENSLPHLLFSGTLCLVHTIESDAALIMVLQIHLTEPEGDILLFLTGQEEIGHACEPLHERMKPFGGDILELIIFHVYSALPNEVQSKIIEPTPVKRKVVVATNKQLANELHEISKLSIL

SEQ ID NO: 81045 - protein, 164 aa, Zea mays
  Coding DNA Sequence Number=SeqID_39266
  Homolog annotation: Hit_ID=Q3S4H7; Match level="QueryCoverage=90%, HitCoverage=71%, E-value=3e-54, Identity=67%"; Hit description =Putative wound responsive protein
  Subcellular localization annotation: CTP_CleavageSite=75; ConfidenceScore=5.21e-01
MELPVFCRPALQAKLLAAALINNSLTKSGQLGTALFGAISKYRNVSRFISPISQTSTKNIGPCCSFSSSFDVEVRSGSEGYVIKMRDGNNLRCVHSNFQGRNIPESAPQPAIVLRIEDGSRTLLPIIVLEMPSVILMAAIHNVHIVIPSIVINYIVSYYLFCLM

SEQ ID NO: 81046 - protein, 211 aa, Zea mays
  Coding DNA Sequence Number=SeqID_39267
  Gene Ontology: Mol. function=DNA binding
  Homolog annotation: Hit_ID=Q3S4H7; Match level="QueryCoverage=85%, HitCoverage=92%, E-value=3e-72, Identity=68%"; Hit description =Putative wound responsive protein
  Subcellular localization annotation: CTP_CleavageSite=75; ConfidenceScore=5.19e-01
MELPVFCRPALQVKLLAAALINNSLTKSGQLGTALFGAISKYRNVSRFISPISQTSTKNIGPCCSFSSSFDVEVRSGSEGYVIKMRDGNNLRCVHSNFQGRNIPESAPQPAIVLRIEDGSRTLLPIIVLEMPSVILMAAIHNVHIVKLVRVNKRIQEAYCAELYLTKVNDPTDNITFDLQPSDWDWEEDEEMIWCYQGQAPSPRNGPSSFA

SEQ ID NO: 81047 - protein, 323 aa, Zea mays
  Coding DNA Sequence Number=SeqID_39268
  Homolog annotation: Hit_ID=Q9ZST2; Match level="QueryCoverage=43%, HitCoverage=23%, E-value=5e-32, Identity=49%"; Hit description =Pyrophosphate-dependent phosphofructokinase alpha subunit
MGRRPVELQIQPLIPLPTFAVLNHRSPTYLPCCRFSHGSPISPPIRLPSISVVNDPTDNITFDLQPSDAINIAVRCKGTTVRVEYGDAAIAADPAGAHVISHAFPHTYGQPIAHFLRKTAVVPDAKAISEHQVVRVGIVFCGRQSPGGHNVVWGLYEAIKAHNQNSKLIGFLVSMNKVEALYRLFKKICNTFIDDGLINKTRRTILLATQLSTWVTRKTCLLADLEEDDVKWCSCNLQSEIWTCVQENVEVEIAPEKNRDTMKTGGFVLQSSCRGDATVKATGVKTQMLSLEIWQRYGRVLRFTSIIVCNLIHTLLYIKFMML

SEQ ID NO: 81048 - protein, 246 aa, Zea mays
  Coding DNA Sequence Number=SeqID_39269
  Gene Ontology: Mol. function=diphosphate-fructose-6-phosphate 1 -phosphotransferase activity; Cellular component=6-phosphofructokinase complex; Biological process=glycolysis
  Homolog annotation: Hit_ID=Q9ZST2; Match level="QueryCoverage=56%, HitCoverage=23%, E-value=4e-32, Identity=50%"; Hit description =Pyrophosphate-dependent phosphofructokinase alpha subunit
GTTVRVEYGDAAIAADPAGAHVISHAFPHTYGQPIAHFLRKTAVVPDAKAISEHQVVRVGIVFCGRQSPGGHNVVWGLYEAIKAHNQNSKLIGFLVSMNKVEALYRLFKKICNTFIDDGLINKTRRTILLATQLSTWVTRKTCLLADLEEDDVKWCSCNLQSEIWTCVQENVEVEIAPEKNRDTMKTGGFVLQSSCRGDATVKATGVKTQMLSLEIWQRYGRVLRFTSIIVCNLIHTLLYIKFMML

SEQ ID NO: 81049 - protein, 468 aa, Zea mays
  Coding DNA Sequence Number=SeqID_39270
MYREALWQKRGRPRELYPDVSSKDAHVPPELPVPNCDCGRLAWGHQKCFFFQWIDGPDKFDPRYLLFVNWLSGKTSHERFKRWVPPPPNPPPMTDAEKEVATERRMDSPPRCDCGDRAVIDEDYDKQFCCPNIDYPYGWRKCRFREWLYGPLSHWPEPEVKEKRYMGWAAEEVKFDPVLCKCGIEAKYGLVPSELGVGYFCGHMVDYDEETRKCSWESYDDKGEVMRTIESKRIMGQKMRCGSQLVDSYINDRIRDMRREAKSAFYDSPKRAEYRRLKAADEKRAQDAREWEAAQAEKQMLDNLADRLKGKIGSGVNYLADEAHARYVQDKMATVELMEEEDDDTSRLSELIALAEAGLHEEEEDDMSRLSELIALAEAGLRAQEEEDEFLSQAAAEVEAAYYKKKSDEAEAEDELFSQAADEAEANYYKRTGDKCDAGQCSKWNEVVVEDCATDDSEDELLIDYDSD

SEQ ID NO: 81050 - protein, 85 aa, Zea mays
  Coding DNA Sequence Number=SeqID_39271
MAHRIALSTRGGGRQKSGEGGSASPVRQCLGSSLEKLHGFMRKRSRGWGEARAMSDWRVPPGSAKARGIAMGRGGPTCAIGVGMA

SEQ ID NO: 81051 - protein, 107 aa, Zea mays
  Coding DNA Sequence Number=SeqID_39272
MPRLKLGEASQLHGKAVQGLGRGWGSIEGAGHDGRARAEMRVVTSLRWQCHKVESRAELSPLPEPYNTRADPVMKKAPDIMSVANSIIDEVVDKLLNEAAEKILNED

SEQ ID NO: 81052 - protein, 440 aa, Zea mays
  Coding DNA Sequence Number=SeqID_39273
WGQLLGRGRRRGRPLRGDSQGGREPRRHEPPRARRRAQRSGVGSGGAAEDWLLVVAGGNNAGCRADRAASTADLAIPDPAIPGFLPHHVWYKRVFHQQVVTKRRTETSRWCLLLRFTIEDMMQGRAILGCGYQRATGEASPIGWCSPRDSRKQGLHSLGADSPGLPSPSCQRKPNRGIPHGESGIGSPLPSLVQSPCPSSCSTRCPCSCSSPSSCSKRFLAVEQSTRRWVLARCAVQSCGCGEQYLSEAHPRAVLPCKGRFSPAGCGAVRRSPNSSCCGGRHPRHAAAVAKLVVPAVGFGSTGELPVRASWFWVFHVVNALLRALAMQVMCRFLENSEVGNIGRVMLPIADAYTRRSWRKENVKHLWPLERDRAARKKIQAPPLPPTAIDPNALGLWKHRDVDVRSCREAIQDNVHSMFIVWVPKNSDVDTLAGELCSWL

SEQ ID NO: 81053 - protein, 97 aa, Zea mays
  Coding DNA Sequence Number=SeqID_39274
MQVMCRFLENSEVGNIGRVMLPIADAYTRRSWRKKIQAPPLPPTAIDPNALGLWKHRDVDVRSCREAIQDNVHSMFIVWVPKNSDVDTLAGELCSWL

SEQ ID NO: 81054 - protein, 73 aa, Zea mays
  Coding DNA Sequence Number=SeqID_39275
MPKPDKTFPFLILPVLPSLLNPGVGPHEFGSSDCPHSLEWLYDKGVQKIYFRKFGLWSLSQGYGFRINGPRFL

SEQ ID NO: 81055 - protein, 76 aa, Zea mays
  Coding DNA Sequence Number=SeqID_39276
MTTGEHKEDKEGECFVWFGHGGGLVPFGIIVKVGYWVQNEIVDWPPGTSNCITFESQRIGTLHEQRMRRRVGRRFC

SEQ ID NO: 81056 - protein, 89 aa, Zea mays
  Coding DNA Sequence Number=SeqID_39277
MAFNTVCSYIGTRDLVQEHIAFKKNVEELREVKECYNVVMLSHPVLEGKPNANHLRASHSTLMVALFFQAVIQRTGPYGEALEKPLEPP

SEQ ID NO: 81057 - protein, 351 aa, Zea mays
  Coding DNA Sequence Number=SeqID_39278
  Gene Ontology: Mol. function=transporter activity; Cellular component= mitochondrial inner membrane; Biological process=transport
  Homolog annotation: Hit_ID=Q66PW8; Match level="QueryCoverage=46%, HitCoverage=64%, E-value=7e-69, Identity=72%"; Hit description =Mitochondrial 2-oxoglutarate/malate translocator
  Pfam annotation: Domain name=Mito_carr; Domain location=216-313; Score=83.5; E_value=6.5e-22; Accession=PF00153.17; Description =Mitochondrial carrier protein
MALPVDVAGLCPRLGDVEAPPKPGSSLSSMAEAESEPLGRARRNSSAEAESEPLGQARRRSSAEAESEPLGRARQRSFAEAESEPLGVGRSGGRQQRPSPSPWVGRGEGLLMGSNENPAVGMGNPLGTRNPHGYGFGQNFIPVMGMGFLAGVFFLRGYGFGQVRIQLGEGSAGQVTRNVLANEGVRSFYKGCFVFLGACLSAGLLRQATYTTARLGSFRKLFIGLTAGAIGACVGSPADLALIRMQADSTLPAAQRRNYKNAFHALYRITADEGEGVLALWKGAGPTVVRAMALNMGMLASYDQFFASACSLPFDYVKTQIQKMQPDANAYSSNDNSNANDLDILESDPEV

SEQ ID NO: 81058 - protein, 189 aa, Zea mays
  Coding DNA Sequence Number=SeqID_39279
MGCVEFRSSVTGVALSVVAKSPETRQTQSSGDLRSRDEGWNGLGIEMAMGTRYPKPVGMGNPLGTLNPHGYGFGQNFIPVMGMGFLAGVFFLRGYGFGQLGRSSELIGGTPVARTGLEGGSGDSGEESRPRGGGFGSAKAWTGFGRVRGTPLTNTGARREAKLASHPAGRGELAQPNSGEAKLAKTKRK

SEQ ID NO: 81059 - protein, 89 aa, Zea mays
  Coding DNA Sequence Number=SeqID_39280
MPRHVMWEAGVAFQFQPTRLREKWASERREEAKSLVELGTPVTRPGARKPWLAMVFGDLYPSAMQLQMVSVASVLEAMGYEMKRPEVLN

SEQ ID NO: 81060 - protein, 98 aa, Zea mays
  Coding DNA Sequence Number=SeqID_39281
MPRHVMWEAGVAFQFQPTRLREKWASERREEAKSLVELGTPVTRPGARKPWLAMVFGDLYPSAMQLQMVSVASVLEAMGYEMKVCVSAVSVVWKKITG

SEQ ID NO: 81061 - protein, 220 aa, Zea mays
  Coding DNA Sequence Number=SeqID_39282
  Gene Ontology: Mol. function=nucleotide binding; Cellular component =endoplasmic reticulum; Biological process=protein folding
  Homolog annotation: Hit_ID=Q9LKR3; Match level="QueryCoverage=40%, HitCoverage=41%, E-value=5e-19, Identity=76%"; Hit description =Luminal-binding protein 1 precursor
  Subcellular localization annotation: CTP_CleavageSite=67; ConfidenceScore=5.61e-01
MPVAEGPSPTSSHGSVNKLAFGPKSFVVVFDPSLLNTSSGRTLSIMISRYLSSKFTQDAHPHLGGVQEEAEVHSHLSCKFVFSQEVKECAISCMSLVVSTFGDGLERELPACLPILVDRMGNEIIRLTAVKRQATKDAGVIAGLNVARIINEPTAAAIAYGLDKKGGEKNILVFDLGGDILLLDVAPLTMGIETVGGVMTKLILRNTVIPTKKSQVFTTY

SEQ ID NO: 81062 - protein, 239 aa, Zea mays
  Coding DNA Sequence Number=SeqID_39283
  Gene Ontology: Mol. function=nucleotide binding; Cellular component =endoplasmic reticulum; Biological process=response to unfolded protein
  Homolog annotation: Hit_ID=O24581; Match level="QueryCoverage=45%, HitCoverage=41%, E-value=2e-26, Identity=95%"; Hit description =Luminal-binding protein 3 precursor
  Pfam annotation: Domain name=HSP70; Domain location=20-239; Score= -374.1; E_value=0.059; Accession=PF00012.10; Description=Hsp70 protein
  Subcellular localization annotation: CTP_CleavageSite=67; ConfidenceScore=5.61e-01
MPVAEGPSPTSSHGSVNKLAFGPKSFVVVFDPSLLNTSSGRTLSIMISRYLSSKFTQDAHPHLGGVQEEAEVHSHLSCKFVFSQEVKECAISCMSLVVSTFGDGLERELPACLPILVDRTGNEIIRLTAVKRQATKDAGVIAGLNVARIINEPTAAAIAYGLDKKGGEKNILVFDLGGGYFDVSILTIDNGVFDLDADILLLDVAPLTMGIETVGGVMTKLILRNTVIPTKKSQVFTTY

SEQ ID NO: 81063 - protein, 133 aa, Zea mays
  Coding DNA Sequence Number=SeqID_39284
  Homolog annotation: Hit_ID=Q10SC2; Match level="QueryCoverage=39%, HitCoverage=5%, E-value=5e-09, Identity=58%"; Hit description=FHA domain containing protein, expressed
MALKYLKVLEVNLKNVVFLYFLHSSLTTSSKTEHHYVRHIYLGNSNQKAEENIPHNCSVRAIPREEGGRGQGTGENLGPEASLLGDGGENSPDVGLRLLDRLVRELARHRAHLVGSDLGRRGQRNPVAEAVES

SEQ ID NO: 81064 - protein, 397 aa, Zea mays
  Coding DNA Sequence Number=SeqID_39285
  Homolog annotation: Hit_ID=Q5NAX2; Match level="QueryCoverage=37%, HitCoverage=48%, E-value=2e-38, Identity=48%"; Hit description =Ubiquitin-conjugating enzyme-like
  Pfam annotation: Domain name=Extensin_2; Domain location=1-305; Score= -139.0; E_value=0.072; Accession=PF04554.4; Description=Extensin-like region
LSVKDVVSRAGPEGGQPERPHRAPKFQEPHHRRAHCVLPSRATPPSPRPQSPPPPRRQPPRSPRRRASYSRNSAAPAIPAPASPQSAFPAAPSKLRASNAPYPLRHQIPCATKSPNGRHDRPAPDPRRAATLRARRWNCARAMPTHPLLLARPSLPPRLPRLVLSLLGRRAPLAFGRLRYGVPLPTPPKVTPDEVRAVARKFADQPIQETEPDVSAVLTAISKKARLRPQKVYYHCGGLLLNPDLYESEKGLVLNDRPYFNEPGYKNSAETTGGERCSLAYNQTAFVRSCKTMLYSLRKPPMHFETLVLWHFHEHERAILDACRAYMSGTVVGSSAGTGSNRRYVHDKCFAEFHKSLTLYTEHLRAEFAANRRRVIELETNRAVTLMVEQQNLAHNK

SEQ ID NO: 81065 - protein, 143 aa, Zea mays
  Coding DNA Sequence Number=SeqID_39286
  Homolog annotation: Hit_ID=Q9LI45; Match level="QueryCoverage=45%, HitCoverage=18%, E-value=3e-12, Identity=60%"; Hit description =Putative PRX
MGWQFYDHSCPKAKEIVQSIVAQAMANGTRMAASLVRVSDCIFRDCFVKCIGKAFFVECQRALGKEKQSLRRRVTETAALPSVPGDTRQRRLGKQCIGKAFFAECQRALGKEKQPLRRRVTETAALPSVPGDTRERSYHRVSM

SEQ ID NO: 81066 - protein, 161 aa, Zea mays
  Coding DNA Sequence Number=SeqID_39287
MKKDILDNANVDIIFNDFALRRVKGFKCYVDDTRQRGWLCRVPHRTLGKEPDMGTLSGGLFAECPKRHSAKMDSLPSAAGQTLGKDNSFAECHQGHSTKPPSPSPGAVTAAFLCRVLSGTRQTYLPSAREKALDKEGFADALFVEPSLPSATLGKAFAECF

SEQ ID NO: 81067 - protein, 358 aa, Zea mays
  Coding DNA Sequence Number=SeqID_39288
  Homolog annotation: Hit_ID=Q6QP51; Match level="QueryCoverage=61%, HitCoverage=99%, E-value=3e-20, Identity=37%"; Hit description =Putative growth-regulating factor 1
MAAAGERKRRSNRLQAHVPSWSSRRALSHGGRRHLWQAKRATLHLRHNDRVKERDRERGYSCEGSGLRALLLIRGSKAGPSKGFDSRLRALGLRAHYWSEVRRLAPRKGSTVASGHLGSAPTTDQGFVGWPPEGFDSRLRTRRARDDSGYVRYMAEAWATLPRSIQCKDRLTPYPDARSSVDKAEQPSPALGAIGSSASLDPRARTQPRPRTMVSASPDPSARTQPRPRKTVSASPDPRARTQPRPRRTVSASPDPRARTQPRPRRSLRLARPWAQTDHVAGGYIITLPLASSGYGEQDRRPIWLAPVKQVMMTPRVLHDDGGSQPPTEARRRQQGPDSSDSCASTGFKRSSDGHDIT

SEQ ID NO: 81068 - protein, 78 aa, Zea mays
  Coding DNA Sequence Number=SeqID_39289
  Homolog annotation: Hit_ID=Q6QP51; Match level="QueryCoverage=34%, HitCoverage=12%, E-value=4e-09, Identity=100%"; Hit description =Putative growth-regulating factor 1
MATTGERKRRSNRLQAHVPSWGSRRALSHGTEKEDTPKGILLCEGSGPRALLLIRGSKAGPSEGFDSRLRALRLRAHY

SEQ ID NO: 81069 - protein, 149 aa, Zea mays
  Coding DNA Sequence Number=SeqID_39290
  Homolog annotation: Hit_ID=Q6ETL7; Match level="QueryCoverage=21%, HitCoverage=5%, E-value=1e-07, Identity=78%"; Hit description =Putative oxidative-stress responsive 1
  Subcellular localization annotation: CTP_CleavageSite=39; ConfidenceScore=5.48e-01
MTTNFPPPPQWSQFANTPALPPQFNTPPTHIPALGDRVTPEAGGSGSDPAAGTRFVDSLFAFPPPSGGGGSGQSSNHPSGGAPSGGSEGGAGGMWKGKKSGPLAPWGWKREFPIRAEDYELLEPIGDGATTVMRRARCLPHGRLSPSRS

SEQ ID NO: 81070 - protein, 54 aa, Zea mays
  Coding DNA Sequence Number=SeqID_39291
  Gene Ontology: Mol. function=protein serine/threonine kinase activity; Biological process=protein amino acid phosphorylation
  Homolog annotation: Hit_ID=Q6ETL7; Match level="QueryCoverage=89%, HitCoverage=10%, E-value=5e-09, Identity=58%"; Hit description =Putative oxidative-stress responsive 1
MWKGKKSGPLAPWGWKREFPIRAEDYELLEPIGDGATTVMRRARCLPHGRLSPS

SEQ ID NO: 81071 - protein, 137 aa, Zea mays
  Coding DNA Sequence Number=SeqID_39292
MNGQSANQEQRNRKKKRREELAVYSQEAVSDANILDVFVPRVRQTFDTREEAYLFYLNYAKLASFSVSTKRTSKETNHWEVKRFCRERAGGTKTKRWFGLGGAVGSDQVLLARRFDLGAFSILNAPRKPRPETDQVL

SEQ ID NO: 81072 - protein, 62 aa, Zea mays
  Coding DNA Sequence Number=SeqID_39293
MKRRFGLGGAVGSDQVLLARRFDLGAFSILNAPRYNGSPGLRILKEAQFDKDVAIISGRFRK

SEQ ID NO: 81073 - protein, 62 aa, Zea mays
  Coding DNA Sequence Number=SeqID_39294
MKRRFGLGGAVGSDQVLLARRFDLGAFSILDAPRYNGSPGLRILKEAQFDKDVAIISGRFRK

SEQ ID NO: 81074 - protein, 50 aa, Zea mays
  Coding DNA Sequence Number=SeqID_39295
MKRRFGLGGAVGSDQVLLARRFDLGAFSYIECTQGRYNGSPGLRILKEAQ

SEQ ID NO: 81075 - protein, 99 aa, Zea mays
  Coding DNA Sequence Number=SeqID_39296
MPQDLNHVALAQARRSSVLRRATSWTLVCEGIEVQGCICKENEEEIEVEEARTTPPPPEEPQAGNCFYFDIYGAEPDSPITQGDRSCVLNQLLHFLPWF

SEQ ID NO: 81076 - protein, 81 aa, Zea mays
  Coding DNA Sequence Number=SeqID_39297
MVRHILVRINQIRACSRVASENEEEIEVEEARTTPPPPEEPQAGNCFYFDIYRAEPDSPITQGKPRCICHLLAILKSFSLT

SEQ ID NO: 81077 - protein, 417 aa, Zea mays
  Coding DNA Sequence Number=SeqID_39298
  Gene Ontology: Mol. function=acetolactate synthase activity; Cellular component=chloroplast; Biological process=branched chain family amino acid biosynthetic process
  Homolog annotation: Hit_ID=Q6K1X7; Match level="QueryCoverage=78%, HitCoverage=100%, E-value=6e-99, Identity=71%"; Hit description =Putative acetolactate synthase small subunit
  Pfam annotation: Domain name=ACT; Domain location=248-314; Score =40.8; E_value=4.7e-09; Accession=PF01842.15; Description=ACT domain
  Pfam annotation: Domain name=ACT; Domain location=94-158; Score=48.7; E_value=2e-11; Accession=PF01842.15; Description=ACT domain
  Pfam module annotation: Pfam domain module=ACT::ACT; Domain location =248-314::94-158
  Subcellular localization annotation: CTP_CleavageSite=59; ConfidenceScore=5.88e-01
PTTRPATFALHGSGMSVASSHRLRPSPSGPARRPGSAAPRVAFWPAGASPPYRGRCTVVAAAAAAGAGGEASSAPVAVSAVAPAGAARDKVRRHTISVFVGDESGMINRIAGVFARRGYNIESLAVGLNKDKALFTIVVSGTDRVLNQVIEQLNKLVNVLSVEDLSKEPQVERELMLIKLNVEPDQRPEVMVLVDIFRAKVVDISEKTLTMEGDVYPVESYESLSVNHVLDAHWGVLDDDDATGLRSHTLSILVNDCPGVLNIVTGVFARRGYNIQSLAVGPAEKEGISRITTVVPGTVESIEKLVQQLYKLIDVHEVHDITHSPFAERELMLIKVSVNTAARKEILDIAEIFRAKPVDVSDHTVTLQLTGDLDKMVALQRLLEPYGICEVARTGRVALVRESKVDSKYLRGYSLPL

SEQ ID NO: 81078 - protein, 256 aa, Zea mays
  Coding DNA Sequence Number=SeqID_39299
  Gene Ontology: Mol. function=acetolactate synthase activity; Cellular component=chloroplast; Biological process=branched chain family amino acid biosynthetic process
  Homolog annotation: Hit_ID=Q6K1X7; Match level="QueryCoverage=94%, HitCoverage=100%, E-value=3e-99, Identity=81%"; Hit description =Putative acetolactate synthase small subunit
  Pfam annotation: Domain name=ACT; Domain location=87-153; Score=40.8; E_value=4.7e-09; Accession=PF01842.15; Description=ACT domain
VEDLSKEPQVERELMLIKLNVEPDQRPEVMVLVDIFRAKVVDISEKTLTMEGDVYPVESYESLSVNHVLDAHWGVLDDDDATGLRSHTLSILVNDCPGVLNIVTGVFARRGYNIQSLAVGPAEKEGISRITTVVPGTVESIEKLVQQLYKLIDVHEVHDITHSPFAERELMLIKVSVNTAARKEILDIAEIFRAKPVDVSDHTVTLQLTGDLDKMVALQRLLEPYGICEVARTGRVALVRESKVDSKYLRGYSLPL

SEQ ID NO: 81079 - protein, 209 aa, Zea mays
  Coding DNA Sequence Number=SeqID_39300
MARDLRVFPYGRNIVVVVSAVMNKDRQDAAQKRRAVVRMVDPVREAKRARGSAEAAASGSSKPVPAAKPAAPGASKASTGEKATAAGGTKPPQADLRPRSCLRRGSVLLTSARISVSRIIWLVSIFFDRRHVAGSGKGQLVVVPPSVAATSPSVVVKAKGATQDPWAAFCASGEILTAAAAKDVAGTMSQQLREVSQQLSQQLTQQRSK

SEQ ID NO: 81080 - protein, 478 aa, Zea mays
  Coding DNA Sequence Number=SeqID_39301
MARDLRVFPYGRNIVVVVSAVMNKDRQDAAQKRRAVVRMVDPVREAKRARGSAEAAASGSSKPVPAAKPAAPGASKASTGEKATAAGGTKPPQADLRPRSCLRRGSVLLTSARISVSRIIWLVSIFFDRRHVAGSGKGQLVVVPPSVAATSPSVVVKAKGATQDPWAAFCASGEILTAAAAKDVAGTMSQQLREVSQQLSQQLTQQLKQHADAVRDKSAAESKNRRLAEKVATLEAEKTDLRRRLAKERREANQAVAEAQAAQAEAKVALAKGSLASQRVEEWEARFNTLRSRVDKAETSEELVVLSTIVQGFMSYASLVTCEGAMNALSREGCKHYEVFDQSDENFEHEIFKAENPVVKQSTGALFDRMWGPHGREAVREQSDRAREQMARAEDVEDLGDLNGAWPEAEVNPVLPEAEVNLALPSEVGEGSSATPVSTVSGEGSLPAPAPTTEDPPKAVAEPAAEDPMAAAGPSQVA

SEQ ID NO: 81081 - protein, 133 aa, Zea mays
  Coding DNA Sequence Number=SeqID_39302
MDKNQNLAYAPYIMALIKAKTRFEGPCEIIHTSFRPFKNEIGFLTRPLTPFLDDEEEAGYDAGDAPEADAEQMPPPPPPPQPQQYWQPCPGYFDPYFQNMQQGLQTHMDSRFQGMMTHMDQRMDAMQSRFDDN

SEQ ID NO: 81082 - protein, 98 aa, Zea mays
  Coding DNA Sequence Number=SeqID_39303
MQQGLQTHMDGRFQGMMTHMDQRMDAMQSQFDDNLDAINSELSQFRSHIQDHVTDPIMTRLNNMHQSFQDNMGALSSQFDNLSTNESIQDISQRQQQL

SEQ ID NO: 81083 - protein, 205 aa, Zea mays
  Coding DNA Sequence Number=SeqID_39304
MGKPVPSLLMLLLSRGRGHGSSSLIRCEKQTIRIEFLSLQVTALVPTTTGMGDHVSGRVRGYVCGQVHSVPAERKRAARLTGGERGPARGGVGFGRSWRSQRGYVRKESKNGTEIYPVYVHQRSGEVQQPWTGFSGEAKSDSLLEELHRGMHGLFRGSGVDGKGSAGRSTVAGARVAAGTPFAGQTPVVSGSGEVEHARRSTVDA

SEQ ID NO: 81084 - protein, 240 aa, Zea mays
  Coding DNA Sequence Number=SeqID_39305
MGTHIQEIALGARRRPCARIFAKDSHACGLDELLNMGRRTLPRVRRALSAPQHAPRPDPRAPRARVEPCPVSPARAPRPIKPPLGVDRTPPRMLDLSGARDHRRLPCKRRARGHPSPCHRRPASRALPIHARPSEETVHASVKLLEQGIGLCFAGEASPRLLDFTRPLVNVDRHTYSYSLHSIDCNLADGEYVLVPEQGVAQEVASDPAPEPTPEDLPAPALEGKPRFMHNPFYMLFYCT

SEQ ID NO: 81085 - protein, 73 aa, Zea mays
  Coding DNA Sequence Number=SeqID_39306
MGVWTMFMSFTYDVMESHRNRRPDEAETTNNLTLQYHRVLMDDEQPATWALDTHVTPGDDKSSLALSSMEHRN

SEQ ID NO: 81086 - protein, 226 aa, Zea mays
  Coding DNA Sequence Number=SeqID_39307
MTLGTSDTWPRLGLRSRGTLGHFRDQQERFCNRIPSEGGIEPSDPIERDRVRQITCRVRLTAAKSNLRRNRKLRLARPWASASGGSLRLARPQGSAPASASEGGLYLARPQGSASTSTSEGGLRLARPQGPASTSTSGGIASSPDLGLRRSLRLARPWARTDHAAGVMESHRNRRPEEAETTNNLTLQYHRVLMDDEQSATWALDTHVTPGNDESSLALSSMEHRN

SEQ ID NO: 81087 - protein, 136 aa, Zea mays
  Coding DNA Sequence Number=SeqID_39308
  Homolog annotation: Hit_ID=Q69W36; Match level="QueryCoverage=40%, HitCoverage=13%, E-value=2e-11, Identity=70%"; Hit description =Putative eIF3e
MALATTANSTRDSSRENKCGENENQGLFDFSCGILVVSMLESEFEERWANGEIPGWGNKGAEKGFICSRYLNAIQTNAHHLIRYLATTVVVNKRRRNMLKELIKKLIECEQGVLDKESLYLKTGGYKKLEWLSEGF

SEQ ID NO: 81088 - protein, 254 aa, Zea mays
  Coding DNA Sequence Number=SeqID_39309
  Gene Ontology: Mol. function=translation initiation factor activity; Cellular component=signalosome complex; Biological process =regulation of translational initiation
  Homolog annotation: Hit_ID=Q8GVI0; Match level="QueryCoverage=78%, HitCoverage=41%, E-value=5e-75, Identity=69%"; Hit description =Putative eIF3e
MAFGPKFLIPFTPAVLVQPWSHGGGTPSLDQPERLAHSTGNNTPCTHAPHEGKEPIQIGPDQIEALYQYAKFQFECGNYSGAADYLYQYGALCTNSERNVSALWGKLAAEILMQNWDLALEELNRLKEIIDSKVLTSMFCFVFFVLCVHYITNPCSFLIFGQNFSSPLNQLQNRIWLMHWALFIFFNHIRYLNAIQTNAHHLIRYLATAVVVNKRRRNMLKELIKVIQQEHHTYKDPITEFLECLYVNYVVVGF

SEQ ID NO: 81089 - protein, 279 aa, Zea mays
  Coding DNA Sequence Number=SeqID_39310
  Subcellular localization annotation: CTP_CleavageSite=16; ConfidenceScore=5.35e-01
MTAAWRFARPMVGTPSAGSGSPMHRLEVPSPPVWLPGANPAMAPSPLDKGKGATSSASAPGSFGGSEEERRRRLRHTDGRSFWSPPEAPEDCGWGRGGQLSGPRRTEARQSFGPAATTTIWGASSSAAPKATPPPPDTRPTDGSGSQQQESAEGGASDPPLVAAKTAPVASHAPAGDPAAAAPASSGVVVADVTPGLKANRMRTMYVPGSELTAVRSKLDDGNLAAGFCLPLRLAEAATPVPATEYSPETRGAGALRVPWGDLDGRGGWGGRGEPSGGD

SEQ ID NO: 81090 - protein, 1135 aa, Zea mays
  Coding DNA Sequence Number=SeqID_39311
  Gene Ontology: Mol. function=potassium ion transporter activity; Cellular component=membrane; Biological process=potassium ion transport
  Homolog annotation: Hit_ID=Q69L87; Match level="QueryCoverage=76%, HitCoverage=96%, E-value=0.0, Identity=65%"; Hit description =Putative high-affinity potassium transporter
  Pfam annotation: Domain name=K_trans; Domain location=300-1135; Score= 916.9; E_value=8.5e-273; Accession=PF02705.7; Description=K+ potassium transporter
  Subcellular localization annotation: CTP_CleavageSite=41; ConfidenceScore=5.11e-01
MGKGGISKKDPSQRRKRAPSPPTNQGGSKTGPSEGFDSRPRACRVRDDPGYVRYMAEARATLPRSSASGATRSSASPDPKPRPRPQPQPRKKISASPEPSLGLKRSLRLARAQPRPQEKAQGTSPTATLARVQGSRRFSDGHAQTAAGGRATPSVSFSPSAESGPAPGGDTGGRTSTSKEEASAALGPSTAASSLWTSAKAASSSSDEKLHAMPQQAVLVGLTAGMVAAEGKAAGNKTMMQKQQASSCCSDRDQDMADLELALEAVVPVSVQRQDSLYRDATRAGGGGQQQHEGWARTLRLAFQCVGVLYGDIGTSPLYVYSSTFAGGIRDTDDLLGVLSLIIYSFLLFTIIKYVYIALRANDDGDGMYVLLSSIHPYMADASSHSHLNVLAYGNLGGTLALYSLISRHAKVSLVPNHQPEDELQTTDAAAAVLGKHGSVRRRTVQLAASHGREQRAVWVKELLETSKPVRISLFFLTIVATAMVISDACLTPAISVLSAVGGLKEKAPNLTTALRHPQGGLPVRPRLLLWLLLIGGVGVYNLLRHDVTVLRAFNPKYILDYFRRNGRDAWVSLGGVLLCFTGTEALFADLGYFSIRSIQLSFGFGLVPAVLLAYIGQAAFLRRYPEQVSNAFYQSTPESIFWPTFVLALAASVIGSQAMISCAFATISHSQALGCFPRVKVLHTSRQYRGQLYIPEVNLLLALVACVVTLASKTTAVIAEAHGICVVLVMLITTLLLTLVMLLVWRVNAACVALFFAVFAAAESVYLSSVLYRFAHGGYIPVAMSAVLVAVMVLWHYVHVKRYKYELERTVSHESVVRDLLPRCRTVPGVGLFYTDLVQGIPPVFPHLVDKIPSIHAVLLFVSVKHLPVPHVDATERFLFRQVASSSESDTAAGPRVFRCVARYGYRDLLEEASDFAGSLVERLQYYIRDVNLYGVEHQQPGAKVSYPSSRCDSMILMARQRSSVMMLRQSSAASYYSSYAAAAETQQLQLARARSTSGAGGILLHSASERAEQLARARSTGIFAEEMLTPAESFSELSRMGSIGGGGMQAVKISLEEMARIEEEQRFIEREMEKGVVYILGESEVVARPHSSLLKKLLVNYAYAFLRNNCRQGEKMLAIPKSQLLKVGMSYEI

SEQ ID NO: 81091 - protein, 214 aa, Zea mays
  Coding DNA Sequence Number=SeqID_39312
  Homolog annotation: Hit_ID=Q6QP51; Match level="QueryCoverage=34%, HitCoverage=34%, E-value=1e-24, Identity=77%"; Hit description =Putative growth-regulating factor 1
  Subcellular localization annotation: CTP_CleavageSite=41; ConfidenceScore=5.21e-01
MEARAHMSCNRRNGYCVQGNRTATRANAVSSRLRNQYHDPRASDTFGRRSGCRFTSVIMTVSKKAGPSEGFDSRPRACRVRDDPVYVLYMAEARATLPSRQGRSDRSHFAPLLTDLTGKQRCSPRSGYRANHQDKTESRSPMSLTSGPGLSLSLRRRSLPRPTPGLGLSLGLGRSHNLARAQPRPQEKAQGASSMATLARVQGSRRLSGSHDST

SEQ ID NO: 81092 - protein, 137 aa, Zea mays
  Coding DNA Sequence Number=SeqID_39313
MGRRWAHCSSSDPEKTALRAGAQGKGIAVQGRTAMGIAEREEVGWEMEALVGGARRHAMGERATSMEEEEQSSLLLCCGDQGGRKGAPAARLQGASAREEGAMVRSGARAPAMEESRASTAMGGAPARSREEKGSLP

SEQ ID NO: 81093 - protein, 103 aa, Zea mays
  Coding DNA Sequence Number=SeqID_39314
MGIAEREEVGWEMEALVGGARRHAMGERATSMEEEEQSSLLLCCGDQGGRKGAPAARLQGASAREEGAMVRSGARASAMEESRASAAMGGAPARSREEKGSLP

SEQ ID NO: 81094 - protein, 137 aa, Zea mays
  Coding DNA Sequence Number=SeqID_39315
MAGSRGSRGTGHSAPCAQGNSRGTKKWSREGAEAEGKLQGVAPWGGVELERRPWRRVGRRRPWEELLPVTPHMQRRQRPRGRGACTRGLGHGEEQGAGVLPRSSAMAASAGRHGKAGGMGAMAAGGSLLLPAMERKE

SEQ ID NO: 81095 - protein, 354 aa, Zea mays
  Coding DNA Sequence Number=SeqID_39316
  Subcellular localization annotation: CTP_CleavageSite=76; ConfidenceScore=5.07e-01
MEKSRAPACSQGARPWLHLLGRHGKAGGMGAMAGRKLLRATVRKTGTGSSQGGAATGRGARLASSLEEGARRKGRLAAMGGPCAPACCCREEERRLLLRENNVDAESNTERRGLTGVNDDDDGLSPNTNATAWVGTAQIGSMQATPTGSHGCCSLRHFDEHAEGATQREPMWLRELPSRLLREVDGALLAWARGGTEMGAESSRLALGACTWGFSAGEVRLGEGAAGAWWRRPMERRGGHAVDGGEGHRAMDLMGKGRLHQGAWPWRRAGRRRAPKELGHGCICWAPWKSRGHGCHGWEETPARSREEDRNRELAGRSGDRKGSSAGVQLGGRSSPQGKAGGHGRPLRAGVLLP

SEQ ID NO: 81096 - protein, 101 aa, Zea mays
  Coding DNA Sequence Number=SeqID_39317
MAAAKAPSGKGKGEGGNGEGRRGGGGSPATGTGRGGAAERGDRSATGRGGARAGGRGGGGLGNQKKCKVRHGASNNIKYLGFFLHGKSKPNPARTLEKVKV

SEQ ID NO: 81097 - protein, 173 aa, Zea mays
  Coding DNA Sequence Number=SeqID_39318
MKLTLSEVREIINCNYGRGSASGRYGVILPSAVQNMGTNVERNNKVVNRTLKKRGCGVFLATRIDGRLRRVSGGGTANRGRQPLHSNQKKCKVRHGASNNIKYLGFSYTGNPNRIPLELWKRSRFSEGKKKKKRFLKGKCALGPFLSILVIECQHKVLKCEFMLMDGQSANQE

SEQ ID NO: 81098 - protein, 69 aa, Zea mays
  Coding DNA Sequence Number=SeqID_39319
MERGSAAAQWFRGEILRFLDPDHVDPRAIDLAMRIVERMFLKMKEDEAKNEIEEEENDRWRPNDESTSS

SEQ ID NO: 81099 - protein, 168 aa, Zea mays
  Coding DNA Sequence Number=SeqID_39320
MDSGAETNAHDGTRLRGGAVVPGRNSPLPGPRSYARQPQSRFAIITRLPPTTPRDGGGARHGIAADEGEGHGDGGLYTRGEAQRPRPKRAGRTALVTQGSGARIADGWRRMSPTRWSQARSDFLGSLSLRALEFVLSLHGGGGFALQMGAPYHARRQGPGGSVNFGFC

SEQ ID NO: 81100 - protein, 168 aa, Zea mays; identical to SEQ ID NO: 81099
  Coding DNA Sequence Number=SeqID_39321

SEQ ID NO: 81101 - protein, 171 aa, Zea mays
  Coding DNA Sequence Number=SeqID_39322
  Subcellular localization annotation: CTP_CleavageSite=41; ConfidenceScore=5.30e-01
MGNGVGVLYLSQARKIQNPTITAFNRGFRTRLPQFDPNLTDVSERREICGVSWRRMSPTRWSQARSDFLGSLSLRALEFVLSLHGGGGFARQMGASYYPASDTARSARDPWIRLIRRVRVRSGREVEDPAAWWAHPLAVERLKGGSQKSERGTGEPSARCRARARSGCRNS

SEQ ID NO: 81102 - protein, 310 aa, Zea mays
  Coding DNA Sequence Number=SeqID_39323
  Gene Ontology: Mol. function=DNA binding
MNTSAGSLPSGPSWSAPYPSTEPPKSGVTASEWAPYLIQIHLRSRNYYLRQELQLVTGMVLVASPNSISMRHTGNFSTKSRVAVDPHLAMGRVLCYLIGGSVKVIQQAARLLSLLANSVPMPSGALYSSSLPAGAIRHPAGEISSPTFGAPAAHASAGVPDSVEGSAYGAVCGQRVAMPPPSSTASPGAMKQWRDDVDRLLGMAHSTSTRSRPWSSRRQHEATTSVRSPSIRGAQTDDLQAELNRRRTEEYARVSLERARERRQNIEGRNLDRDFAAEAPQTPVGAWSQTGVPLAGMGCAALADHLRMAS

SEQ ID NO: 81103 - protein, 310 aa, Zea mays
  Coding DNA Sequence Number=SeqID_39324
  Gene Ontology: Mol. function=DNA binding
MNTSAGSLPSGPSWSAPYPSTEPPKSGVTASEWAPYLIQIHLRSRNYYLRQELQLVTGMVLVASPDSISMRHTGNFSTKSRVAVDPHLAMGRVLCYLIGGSVKVIQQAARLLSLLANSVPMPSGALYSSSLPAGAIRHPAGEISSPTFGAPAAHASAGVPDSVEGSAYGAVCGQRVAMPPPSSTASPGAMKQWRDDVDRLLGMAHSTSTRSRPWSSRRQHEATTSVRSPSIRGAQTDDLQAELNRRRTEEYARVSLERARERRQNIEGRNLDRDFAAEAPQTPVGAWSQTGVPLAGMGCAALADHLRMAS

SEQ ID NO: 81104 - protein, 108 aa, Zea mays
  Coding DNA Sequence Number=SeqID_39325
  Homolog annotation: Hit_ID=Q8L4B1; Match level="QueryCoverage=27%, HitCoverage=7%, E-value=3e-08, Identity=86%"; Hit description =Putative apoptosis antagonizing transcription factor
MKGSRRTWENLEQLWRRYNADYTTWAYFIAFAITQGHIMEGDPKLIDDSEFYQQLLKEFLESCDRGASDHSVDTNTREILEIPVLWFFFNLLWWQGAILGAYEVAEVF

SEQ ID NO: 81105 - protein, 234 aa, Zea mays
  Coding DNA Sequence Number=SeqID_39326
  Gene Ontology: Mol. function=uroporphyrinogen decarboxylase activity; Biological process=porphyrin biosynthetic process
  Homolog annotation: Hit_ID=Q9AXB0; Match level="QueryCoverage=40%, HitCoverage=23%, E-value=1e-36, Identity=80%"; Hit description =Putative uroporphyrinogen decarboxylase
  Pfam annotation: Domain name=URO-D; Domain location=12-229; Score= -163.6; E_value=0.0038; Accession=PF01208.8; Description =Uroporphyrinogen decarboxylase (URO-D)
MESQTEALGQLATDDLLEEKLALLETSSVDDDLSQLKKELSGSSLDMGEPGTAVENATICTNRRYNADYTTWAYFIAFAITQGHIMEDHSVDTNTREILEIPVLWFFFNLLWWQGAILGAYEIVSRIKKECPNVPLVLYINGNGGLLERMKNTGVDVIGLDWTVDMTDGRRRLGNGISVQGNVDPAFLFSPLPVLTDEIHRLVKAQRFPFNLCYFVFLLNAHMQFINEITSSAA

SEQ ID NO: 81106 - protein, 268 aa, Zea mays
  Coding DNA Sequence Number=SeqID_39327
  Homolog annotation: Hit_ID=Q10MR5; Match level="QueryCoverage=32%, HitCoverage=55%, E-value=5e-09, Identity=44%"; Hit description =Expressed protein
MGSRPLVDEALTSTALYQSCMVCSEDVFQPGPVFLYDLPSSREPEVRAPQAASPFFLHALPSLARGSTASARPCSPPSASARRASPGALVLASEGKFFSNGYDLVWARAGPAPALGHRLFAIRAAFRGLVADLLALPVPTVTTVTGHAAGAGCALAHDAVPMRASRGFSLLARATTWPAGEPARWAPCCGGGNPGPAGPHGDWRQFDRYEEYRYIVSIGPLDFIYTTLQLLRHGVRLTGGQDLEPKTGLLVDFTGDQTCIALPYLIGG

SEQ ID NO: 81107 - protein, 98 aa, Zea mays
  Coding DNA Sequence Number=SeqID_39328
MPRLLDCGTSAVTRGSPACDPTVPIECNDHGSVSRGERRYGRYDQRRTDRVPPILLNAAEKHLQNKPYTADKAQFKSRPHLPRDATSSEPGLGLGRGQ

SEQ ID NO: 81108 - protein, 378 aa, Zea mays
  Coding DNA Sequence Number=SeqID_39329
MLDRRMRRSRKGAQLWCGCMLLAWRSALSFAGFDEDEGMPITRGAVTCFACGGWEPWSTSVETLPVTLGGASEEIGCTCVALFLLLLEGRDLMGDDDRRPRGGEERAGLWPPPALSFKDVHHPCWGGGCAESGPASAWAAGRSFPQCWGEKGVRRPWRCQLPRVWLPGLSGFGAASGAASYRWGEAWLPVRRTGVGRAVRGPATPRSFPRRRLHRGVAYLVVRREGGVRVLGRSRPHPCGEDGSEDLPVRTGAAAIRQCGVGAQVAAVVGAEVGDVGEGLFAVAFALKQSLQLSSRPKRRSLSLLVQWSPASRLEFVIPHAFWSVKPLRALPTSKSRYHSYPKYDLRPLCDELKPEAAVARTEAVLARTEASSARESG

SEQ ID NO: 81109 - protein, 237 aa, Zea mays
  Coding DNA Sequence Number=SeqID_39330
  Subcellular localization annotation: CTP_CleavageSite=37; ConfidenceScore=5.11e-01
MAVLRRGDDPAWRLRWRACQARTTSSGKARARRGCACASAAAAKRRGVEAIQMSARLEHGSCRWQLPRSLRGRVLSGRKWRRWFRVRGDEAANPLNKSIDTHLMKMLPTLILTDLEELEVAKRTGARGKNNEKRETTLRPTKGKGNNKTWRVGGENATKVRIGKTPFSNRDGKDDISKGRHKITSWKDLEITKVLDKHHGKDQGMTRVKVITDKHNQGCILDKICEASKKGKQSMVK

SEQ ID NO: 81110 - protein, 124 aa, Zea mays
  Coding DNA Sequence Number=SeqID_39331
MGRAVPRGRDGSRAAAGAREKGRGVGRREREKGGGARVRVGPPDSGGGGKTARALLPTGKAADGGEGAPSWAAGRARGKRAANPLNKSIDTHLMKMQPTLILTDLEELEVAKWTGARGKNSEKR

SEQ ID NO: 81111 - protein, 58 aa, Zea mays
  Coding DNA Sequence Number=SeqID_39332
MGVDMHLVKMLPTLILTDLEELEVAKWTGARGKNSEKRETTLRPTKGKGNNKTWRVGA

SEQ ID NO: 81112 - protein, 147 aa, Zea mays
  Coding DNA Sequence Number=SeqID_39333
  Subcellular localization annotation: CTP_CleavageSite=39; ConfidenceScore=5.31e-01
MAGPAQPRRAAVPPQGPRPQGPRAHGPGAGRRTAGARVRGNEVLPLQTLEIEENEEQEWSSSPGKKTLARAEVKSVDYRRFEGPIDEPNALRRSPRRDERIGLAANPLNKSIDTHLMKMLPTLILTDLEELEVAKRTGARGKNNKKK

SEQ ID NO: 81113 - protein, 988 aa, Zea mays
  Coding DNA Sequence Number=SeqID_39334
  Gene Ontology: Mol. function=cysteine-type peptidase activity; Biological process=proteolysis
  Homolog annotation: Hit_ID=Q53MK8; Match level="QueryCoverage=80%, HitCoverage=87%, E-value=5e-37, Identity=23%"; Hit description=Ulp1 protease family, C-terminal catalytic domain, putative
  Pfam annotation: Domain name=Peptidase_C48; Domain location=735-981; Score=-30.1; E_value=0.097; Accession=PF02902.9; Description=Ulp1 protease family, C-terminal catalytic domain
MALHKLCDDGGPPALLRKQGDVSKDSTAPTAVPPPGLRRTSDSHDITPARKPRSDTDQRPALAFSAARPRLLRRTQAVALFFVSGKGPGIEEAVVPPLRSPTRQRPRPRSSPPRRPNAESPTPSRGVSDSAALQAHPYSGTSVMKNVDRPPSNPKQIIIQSTQECFSVDIPRAPAGTVRPETRHAADEDDDFMPLSKKRKLDDSPGKVLKKQKLNVRYNPQDVLVSIQILNDRQQQAIARRGFSSILDMRLDALGSRSHLAWLMEKLDHNDMTIRAGPGKELKITKDTVHLILGLPNAGGGTALGIDEAVVANNLRVELGLSKEDFGVTALQDRLRKGSDDDLSIRCFFLILFNRLLFPTASWGITNHEVLLTEQMDRFHQIDWCQLIFNDLCQAAKKWHNRSVTNVSTTIYGCSIVILLYYLDHLHDSAAPQNKRGTPRIKYFDRNIIQALTRADKGKIRKGEEAFGHCSHKTRTKTFDVPRPDPSGQHSIYIELPLIRDLISSKLNQLPSRHRMGFIEKLSHFDAEVGKACTVIKQTLQQIVEKQFNLSDVFGELIDEVLRAEAGDNKDAYDVQKTTSKSDDILPQTAEGCTCLAPPTVPDMSTPVSQLDTQFTDTQGKHGDGGKNMPTNTNVTPKATPHMDPDAPIFDATPQIKSTGGVQQVAETDLPDSGPCFDQTPSEHVYVETDPATNTPQVGQTSLDSEMQTVLALREYLCGLQSDTGRTIIDYGEYSATCSDIYESFADGKCLDNGFMQCFIQCVIHDAKNQQTSMGSNSLVLDVNVGSILNFEEQERHSRNPQPFDESVLHTLLDNSLPETDELDQCKAIMVPMVSRGHWTLYVVNKVKKCIHILDSNPYGPTLGGTTWKDYHFAHLGSGGRKLPWAKVIMSRLNKAIQHVRPSSCFPKFGNFTIDLCQNCPNMAAGSNDCGFYVMGYILFYQCDEGSLRSDIEAGNTSEIRSLALHYITFHPKNKALSLLQDIQRFKV

SEQ ID NO: 81114 - protein, 227 aa, Zea mays
  Coding DNA Sequence Number=SeqID_39335
  Homolog annotation: Hit_ID=Q6QP51; Match level="QueryCoverage=36%, HitCoverage=38%, E-value=1e-08, Identity=47%"; Hit description =Putative growth-regulating factor 1
MAERYQLPQSCVPPTTRRKDCGRPPSGGSEGGKTRCIREREDMVAFQGGHPPFKGDSPYLRPQPSRAESSPARSKVLPYGAGARPHASCKPAQGGRSQTAADRERGIPRKRILLCEGTRLRASLLIRGSKAGPSKGSTAASERVGSTPTTGQRFEGRPLGRVQRPPQATRAPRPLLIRGSKAGPRRVHSRLRHRARDDHGYVRYITKARAALPRYPRTFPRPAGAIL

SEQ ID NO: 81115 - protein, 270 aa, Zea mays
  Coding DNA Sequence Number=SeqID_39336
MHRVFPPSEPPDGGRPRQPDRIPSRWSPKAVTTSSMVGRSKPGCDLCPALSFKDLHHPCWGGERGEPELYLPHESAGHLFFQLLGVETILQLCGGGVLQPCRGRRTVAAQLGCNIPSSVLAFVARTGVRTYRCALGRPALAGAALVDSSRPLSGDANGSLPAAASVLGPSLLLQRSLASRPELVAPQALRSPSVRSALLPEASLVQLKENPWSLCDEPEPEAAVSAWTKAELARKEDFVGRSLAGPSTSGTDAGVKLPRPRAGLVSSEDG

SEQ ID NO: 81116 - protein, 130 aa, Zea mays
  Coding DNA Sequence Number=SeqID_39337
  Subcellular localization annotation: CTP_CleavageSite=63; ConfidenceScore=5.73e-01
MDHDSWYQNQVILTTTSRPSLTTTSRRAISRRNALPPALSNSRCIHSARREFSPFRRAVGSVRCDVPPLQGEDREETPSSGVASDGSARVPGTPPEVEIWVCSPPARPKRVVSFIRAPALVLDRPNIRTG

SEQ ID NO: 81117 - protein, 386 aa, Zea mays
  Coding DNA Sequence Number=SeqID_39338
  Homolog annotation: Hit_ID=Q53M11; Match level="QueryCoverage=40%, HitCoverage=80%, E-value=9e-49, Identity=63%"; Hit description =Hypothetical protein (Os11g0244200 protein) (Hsp20/alpha crystallin family protein, ...
  Homolog annotation: Hit description=expressed) (Low molecular weight heat shock protein (Clone Hsp22.3)-soybean)
  Pfam annotation: Domain name=CS; Domain location=259-352; Score=6.0; E_value=0.0058; Accession=PF04969.6; Description=CS domain
  Pfam annotation: Domain name=HSP20; Domain location=262-367; Score =137.3; E_value=4.3e-38; Accession=PF00011.11; Description=Hsp20alpha crystallin family
  Pfam module annotation: Pfam domain module=CS::HSP20; Domain location= 259-352::262-367
MEARIMAEREASLAADQRMAEMFQYMQSLGAAQGIAPPPPLFPPVDPALFHTPAITLGKEPRPGHRYRFFAECNVFDTRQRSTLCRVPDLAFGKEPDMGTLPDGFFTECPRWHSAKMDPLSSVAGQTLGKDNSVVECHQGHSAKPPSPSLGAVTAAFLCRVPEKKYSAKKALPMHYAVLFSRKASASAAVVVLAVAVVTMACLAAPVAALVPYGRPGGGLWDLMLLDDPFRVLEQSPLAASSVPRASLDSTSAAGVALARCDWKETPDAHVISVDVPGVRREDVKVEVEENSRVLRVSGERRADEEKEGDRWHRAERAAGRFWRRFRMPAGADVDRVSARLENGVLTVTVPKVAGHRGREPRVISIAGGDMGGVDVAEVMASKAEM

SEQ ID NO: 81118 - protein, 353 aa, Zea mays
  Coding DNA Sequence Number=SeqID_39339
  Homolog annotation: Hit_ID=Q53M11; Match level="QueryCoverage=35%, HitCoverage=63%, E-value=1e-25, Identity=54%"; Hit description =Hypothetical protein (Os11g0244200 protein) (Hsp20/alpha crystallin family protein, ...
  Homolog annotation: Hit description=expressed) (Low molecular weight heat shock protein (Clone Hsp22.3)-soybean)
  Pfam annotation: Domain name=CS; Domain location=259-353; Score=3.1; E_value=0.011; Accession=PF04969.6; Description=CS domain
  Pfam annotation: Domain name=HSP20; Domain location=262-353; Score =57.1; E_value=5.6e-14; Accession=PF00011.11; Description=Hsp20alpha crystallin family
  Pfam module annotation: Pfam domain module=CS::HSP20; Domain location= 259-353::262-353
MEARIMAEREASLAADQRMAEMFQYMQSLGAAQGIAPPPPLFPPVDPALFHTPAITLGKEPRPGHRYRFFAECNVFDTRQRSTLCRVPDLAFGKEPDMGTLPDGFFTECPRWHSAKMDPLSSVAGQTLGKDNSVVECHQGHSAKPPSPSLGAVTAAFLCRVPEKKYSAKKALPMHYAVLFSRKASASAAVVVLAVAVVTMACLAAPVAALVPYGRPGGGLWDLMLLDDPFRVLEQSPLAASSVPRASLDSTSAAGVALARCDWKETPDAHVISVDVPGVRREDVKVEVEENSRVLRVSGERRADEEKERRSVASRRARGPDGSGAGSRMPAGADVDRVSARLENGVLTVTVPK

SEQ ID NO: 81119 - protein, 113 aa, Zea mays
  Coding DNA Sequence Number=SeqID_39340
  Subcellular localization annotation: CTP_CleavageSite=7; ConfidenceScore=5.02e-01
MPMLMMPCSSFSYSNTRGVTYRFSAYHAAFALLFAYHVVVVLVFVGLLVAAEHGSALMGLLAFLVCAREAHHGTIGNTTIPHTQLHLRHGAWRHGEMELGRNHDNKVKLWVCP

SEQ ID NO: 81120 - protein, 116 aa, Zea mays
  Coding DNA Sequence Number=SeqID_39341
  Subcellular localization annotation: CTP_CleavageSite=17; ConfidenceScore=5.01e-01
MPMLMMPCSSFSYSNTRGVTLKGGIPRIELGTSRTPSENHTVMDSTSEKMYLCQKSLGVVSPSESIKDRVNVGLLTEDPLTGHMPRHGIHFSKHFCKTESLIIEKPYLDSLKPAYP

SEQ ID NO: 81121 - protein, 107 aa, Zea mays
  Coding DNA Sequence Number=SeqID_39342
MAGGNTLAGAKERWLADEGECGAKRGSNGSWCGFLRETLGDTGVSQPSPLKGISSRDSGQSPPGVKRRIRKAGGGVGGDYIPASLGRQSGKLDLKNSSVSQVASSSE

SEQ ID NO: 81122 - protein, 75 aa, Zea mays
  Coding DNA Sequence Number=SeqID_39343
MAGGNTLAGAKERWLADEGECGAKRGSNGSWCGFLRETLGDTGVSQPSPLKGISSRDSGQSPPGVKRRVRLIGKG

SEQ ID NO: 81123 - protein, 84 aa, Zea mays
  Coding DNA Sequence Number=SeqID_39344
MAGGNTLAGAKERWLADEGECGAKRGSNGSWCGFLRETLGDTGVSQPSPLKGISSRDSGQSPPGVKRRIRKAGGGVGGDTYQLP

SEQ ID NO: 81124 - protein, 72 aa, Zea mays
  Coding DNA Sequence Number=SeqID_39345
MAGGNTLAGAKERWLADEGECGAKRGSNGSWCGFLRETLGDTGVSQPSPLKGISSRDSGQSPPGVKRRKEVL

SEQ ID NO: 81125 - protein, 303 aa, Zea mays
  Coding DNA Sequence Number=SeqID_39346
  Subcellular localization annotation: CTP_CleavageSite=22; ConfidenceScore=5.07e-01
MADSVTEGRLAATTSANAWNQRANLQSDFGPTRRLISSPKVGPGATVGTLKLGYPLLLYKGEEPTWLSLSRVAEVSCVGPSTARPEHGQLLKAHGNTRLRRVDSPKDATWPEEVIYSRILSVSPDPHEKASNPGTHNPNPFEYGLGLPSEQAGPLDEVRTPLSEVRVTRSKVPGQGILWPKSWPDEGLVLTRVWALSCGDQAVSQAACLSVPLAGSAPMLWRALCSSSLVRGQRSFPCTPILRALRISGRKEIALATSISCSKHYIRYVPGPVCRGSAPMYVSPSAIKGEARNVTDPDSLRHT

SEQ ID NO: 81126 - protein, 214 aa, Zea mays
  Coding DNA Sequence Number=SeqID_39347
  Subcellular localization annotation: CTP_CleavageSite=22; ConfidenceScore=5.07e-01
MADSVTEGRLAATTSANAWNQRANLQSDFGPTRRLISSPKVGPGATVGTLKLGYPLLLYKGEEPTWLSLSRVAEVSCVGPSTARPEHGQLLKAHGNTRLRRVDSPKDATWPEEVIYSRILSVSPDPHEKASNPGTHNPNPFEYGLGLPSEQAGPLDEVRTPLSEVRVTRSKVPGQGILWPKSWPDEGLVLTRVWALSCALPLPAQAEARCCHVA

SEQ ID NO: 81127 - protein, 149 aa, Zea mays
  Coding DNA Sequence Number=SeqID_39348
EPPPSSIPSPPEVHDDEQRGDELRDRRPCGQLNAFPAIGGGLVQSDGSTSITAGHGDTMEVPGHVAQGRKAAVTGGLIQSDRGNLYGGRSCLLAGLINDGDIYMTPSVIQALVSTNHFTGGNRGARVVDGEGMNLRLFFSYCTMAFHFS

SEQ ID NO: 81128 - protein, 247 aa, Zea mays
  Coding DNA Sequence Number=SeqID_39349
MGQSPEYKVYFRKSYPTKEKDSQGYAGFRNQGKAFSKNQLRYFCRNRLLKSIYKGMDIKEGNASKGFQISENLGFPESIVKFKRQGPRRPNYGQKRARAGEDPPGSILFQVEVPDGAPHREPSSGELDWPEGAKVGAPEWQTPNRTLPAHFPQHNFTKGYLVCSGSSDRIPCGQLNAFPAIGGGLVQSDGSTSITGCSSGGDQFGQVVLAAGGEKELCAWNRWLSPWQSLWRSPDMHPMVHHDAAKA

SEQ ID NO: 81129 - protein, 70 aa, Zea mays
  Coding DNA Sequence Number=SeqID_39350
MERTKGDRASRHTFVMRDWPTSSGSSLCLVMERTKGDRASRHAFVDVATRRRLRAKGSVFAFAPTLIMFV

SEQ ID NO: 81130 - protein, 412 aa, Zea mays
  Coding DNA Sequence Number=SeqID_39351
  Gene Ontology: Mol. function=DNA binding; Cellular component=nucleus; Biological process=regulation of transcription, DNA-dependent
  Homolog annotation: Hit_ID=Q655P0; Match level="QueryCoverage=69%, HitCoverage=66%, E-value=9e-30, Identity=38%"; Hit description =Putative transcription factor GAMyb
MERTKGDRANHHTFVDVATRRRLRAKGSVFTFAPTLRARLPLYQPDIEQEIARLREENINMLTDDDGCTNTNASLPPPPDLPRLYDSGYQLVLPPTTSHSSLINQDFLLQHQMQVFHHIGNLSQQPAFHQDVSAAVFSSTISSVLPLLPTVRTQADLPPTNQFKTCSGGTGGLLEPMLMISDEQLLMWPNLSMVKVPSMPALSYRQPAVSGLLPAYGAGSDDDVTPHCPPGEDIHHGATWDFTFEEFVKPAKRRRTSEVGIVNMFPVALPEDLLRCVYGTIMVARHRRLVHRRHAVGLVRHLWWVDDTVDGAVVGRRRRRVHRCPARALLRHMRWVNGTVDGAIVENKFYRCQRFTTNQYKSKERVQNKGAKYTEGSPGLAHRTVRTGLSGVPAKQRLLRTNGRLQKTLNAL

SEQ ID NO: 81131 - protein, 150 aa, Zea mays
  Coding DNA Sequence Number=SeqID_39352
MGQRTLAFTKLLLREVSCNTLGNLGLPVVHAKQSFIHHTWRMTKEQYTKHMKQSEHRFNKRGCTLYPRVVIPFQPGLYRPDLHYQGEWPGIHYIAFTNTPLVHSCSLGFTSRTNAVYLPKVLTERYSGKRPEPPRVSQDHQHNQDNNIVS

SEQ ID NO: 81132 - protein, 122 aa, Zea mays
  Coding DNA Sequence Number=SeqID_39353
  Subcellular localization annotation: CTP_CleavageSite=53; ConfidenceScore=5.42e-01
MDLTCQTRPSRTARAHDPRVAVVSTPTTHAKAVSAPNPPKAAAVDPRLRRVPTAVQASQGPLSRSQDNEQPEVSECVVGDFPEQQPGEGKVLETVISAMLTVKSSLGILFDYINFGYFYDDG

SEQ ID NO: 81133 - protein, 62 aa, Zea mays
  Coding DNA Sequence Number=SeqID_39354
  Subcellular localization annotation: CTP_CleavageSite=40; ConfidenceScore=5.14e-01
MGGGLLAAAPALRSVLPLFGPPEQKSSSSLLLEQCFCSLRLSRPEHVCNFGTEPCFFLIFEH

SEQ ID NO: 81134 - protein, 257 aa, Zea mays
  Coding DNA Sequence Number=SeqID_39355
  Subcellular localization annotation: CTP_CleavageSite=68; ConfidenceScore=5.35e-01
MSSCSLMHRVFPPSKPPDGGYPPSFRLIVGGTQLRGSWYLSAIVRLQGFSSCSPAAHLRRRSPKMVTSSLMVGESEPGCGLCPSLSLKDFHHQGWGGDCTVPGSRTRVASEPLAAPASATAAGRGSSAGETARAGHGPTSNSTAFCPSLPHEFGHGRGPPGSSIRPEVSAAAVRPPGAEVVVVAAAGAGDGAPFVGLLLLRRPSPIEWGCSYLRRGNRSSVCNGTLNASVFVHYGCRGLNMYVILARSRVFFLIFEH

SEQ ID NO: 81135 - protein, 109 aa, Zea mays
  Coding DNA Sequence Number=SeqID_39356
  Homolog annotation: Hit_ID=Q69SU2; Match level="QueryCoverage=41%, HitCoverage=10%, E-value=3e-19, Identity=93%"; Hit description =Putative UVB-resistance protein
MIAVGAEHTAAVTEDGDLYGWGWGRYGNLGLGDRNDRLLPEKVSSVEMFTQQQRCRDENPVKRNAADKIATVASYETLQLYCYRTKVENHTKRLKNYTKRHFNLLKVQL

SEQ ID NO: 81136 - protein, 95 aa, Zea mays
  Coding DNA Sequence Number=SeqID_39357
  Homolog annotation: Hit_ID=Q69SU2; Match level="QueryCoverage=70%, HitCoverage=15%, E-value=2e-24, Identity=79%"; Hit description =Putative UVB-resistance protein
MPSSKISQVACGLRHTLALSEKKNVFSWGRGTSGQLGNGEIVDRNTPVLIDALSSDGSACKKLESSTAAPFAGGDRQIMQSIMTLLVGLALFALG

SEQ ID NO: 81137 - protein, 84 aa, Zea mays
  Coding DNA Sequence Number=SeqID_39358
  Homolog annotation: Hit_ID=Q69SU2; Match level="QueryCoverage=80%, HitCoverage=15%, E-value=1e-23, Identity=77%"; Hit description =Putative UVB-resistance protein
MPSSKISQVACGLRHTLALSEKKNVFSWGRGTSGQLDNGEIVDRNTPVLIDALSSDGSACKKLESSTAAPFAVYYTYVLVFTEC

SEQ ID NO: 81138 - protein, 285 aa, Zea mays
  Coding DNA Sequence Number=SeqID_39359
  Gene Ontology: Mol. function=ARF guanyl-nucleotide exchange factor activity; Cellular component=Golgi apparatus; Biological process =protein modification process
  Homolog annotation: Hit_ID=Q69SU2; Match level="QueryCoverage=98%, HitCoverage=96%, E-value=1e-133, Identity=46%"; Hit description =Putative UVB-resistance protein
  Pfam annotation: Domain name=RCC1; Domain location=106-183; Score =10.9; E_value=0.046; Accession=PF00415.9; Description=Regulator of chromosome condensation (RCC1)
  Pfam annotation: Domain name=RCC1; Domain location=188-224; Score =2.7; E_value=0.36; Accession=PF00415.9; Description=Regulator of chromosome condensation (RCC1)
  Pfam annotation: Domain name=RCC1; Domain location=2-51; Score=34.8; E_value=3.1e-07; Accession=PF00415.9; Description=Regulator of chromosome condensation (RCC1)
  Pfam annotation: Domain name=RCC1; Domain location=54-103; Score =33.2; E_value=8.8e-07; Accession=PF00415.9; Description=Regulator of chromosome condensation (RCC1)
  Pfam module annotation: Pfam domain module=RCC1::RCC1::RCC1::RCC1; Domain location=106-183::188-224::2-51::54-103
MAGEVQSWGRNQNGQLGLGTTEDSLLPQKIQAFESVCVKMIAAGAEHTAAVTEDGDLYGWGWGRYGNLGLGDRNDRLLPEKVSSVEGEKMVLVACGWRHTITVSDSGNLYTYGWSKYGQLGHGDFEDHLVPHKVEALKDSTISQFGQVGVGNNDDHSSPGQVSFPEDQKISQVACGWRHTLALSEKKNVFSWGRGTSGQLGNGEIVDRNTPVLIDALSSDGSACKKLESSTAAPFAAKVWVSPSERYAIVPDENVRKAGGGTARGNGADANVPENDVKRMRVQSS

SEQ ID NO: 81139 - protein, 133 aa, Zea mays
  Coding DNA Sequence Number=SeqID_39360
MAVHGRRLLRGEERAGEKFPEHQQVAHRLNPHTAPLDHDHPPAGTIGALLPLSVANRGGDTLTLTRLSRFTGIAARWRDVQRPRRRRYLSSTRTSLEVATEYPSEIHARGAVTAPAMRAILVKVGLTPGPHAS

SEQ ID NO: 81140 - protein, 133 aa, Zea mays
  Coding DNA Sequence Number=SeqID_39361
MAVHERRLLRGEERAGEKFPEHQQVAHRLNPHTAPLDHDHPPAGTIGALLPLSVANRGGDTLTLTRLSRFTGIAARWRDVQRPRRRRYLSSTRTSLEVATEYPSEIHARGAVTAPAMRAILVKVGLTPGPHAS

SEQ ID NO: 81141 - protein, 117 aa, Zea mays
  Coding DNA Sequence Number=SeqID_39362
  Homolog annotation: Hit_ID=Q75LJ9; Match level="QueryCoverage=44%, HitCoverage=25%, E-value=2e-13, Identity=67%"; Hit description =Putative harpin inducing protein
MAQGHISLSVLDGPVHVGFRSDNVAVTLKEMVELDAGSAGASANRCSMASSTVALGGNTMPKASTRTVMRLGFFGSEQERKNKDRERVCIGGRVYASDDRGLLRRIGRSRSVEGRTC

SEQ ID NO: 81142 - protein, 267 aa, Zea mays
  Coding DNA Sequence Number=SeqID_39363
  Homolog annotation: Hit_ID=Q75LJ9; Match level="QueryCoverage=36%, HitCoverage=66%, E-value=3e-26, Identity=48%"; Hit description =Putative harpin inducing protein
  Pfam annotation: Domain name=Hin1; Domain location=81-212; Score=6.1; E_value=0.00046; Accession=PF07320.4; Description=Harpin-induced protein 1 (Hin1)
MKIQRTIEVNRLELELGSSSAANDAALWQAMASSPQAIPFLAATPSRASLLLSHYTFTLHWLNNSDPKNPSLITVLVLAFGMVFPPKATADDAVLQRFALAPADPASNSTISFNVTATVSLRNPNMYRSIEYGVLAVTFSFNGTCFDDSASVPGFGVEMRLDTVLQYKGRSHPTFTPPRVVATAPRPIDPSPSARRGAGRPRPVVRRHAVSPTRIVQLRQHHAQAKKDPINEPYNVGDDYNSDTDEDSKEMEMLIFVKDVQSAMINA

SEQ ID NO: 81143 - protein, 600 aa, Zea mays
  Coding DNA Sequence Number=SeqID_39364
  Homolog annotation: Hit_ID=Q6DKU6; Match level="QueryCoverage=7%, HitCoverage=19%, E-value=7e-18, Identity=93%"; Hit description =Ethylene-responsive factor-like protein 1
  Pfam annotation: Domain name=AP2; Domain location=33-97; Score=115.6; E_value=1.4e-31; Accession=PF00847.10; Description=AP2 domain
MGFGWQPGRRRGVAGRSVSCPTPCAKAKPGRRKNQYRGIRQRPWGKWVAEIRDPVKDVRVWLGTYPTAEAATRAYDRAARRIRGAKAKVKFLPSDTSSSVTVPTAASRSVAACFMGLLCFASHLALFALVHFPLVKLTTHSFTFAMGGGDLFSSPSRGSVRSEFGTVVSPGDSNLGSLLTCADYLSDSDSNSSKEGIAWTRNRTWVTILATASGKSVFAILACCSCSWLMEMDCSIREVKHKSLACRSTGRQLPGRRAGASRDCGVAVAATRDSGTTTDRRRAEPPRHRAQRERERKKKGQGRGLTCGLWGSLAVARWDVGTRTAVDEVMEDLLSLESCLLGEQQMGRGPWQLDGWLSGWTEDLPLKVGQKHGRLLADLEEDEQPKKNVRLGSPATQWISVYNARRPMKQSKHGWTDPVKFSISTLEAWQQSLKCKKTALKTVMLLAERLPIVRWPLLSLPGKHISSSWVLLRPGGTGTHVKCIFRVKGKYKLRPAILETNIIFCVVSLNSCFDGFHFLNTKSKSVFSVLIKGPPSALAWLLDAFASATFDQIDSAYREAGGDPFVATAAMFLHLFGRFVIQFFFVGSVTTDLQTGGLDS

SEQ ID NO: 81144 - protein, 532 aa, Zea mays
  Coding DNA Sequence Number=SeqID_39365
  Homolog annotation: Hit_ID=Q6DKU6; Match level="QueryCoverage=8%, HitCoverage=19%, E-value=6e-18, Identity=93%"; Hit description =Ethylene-responsive factor-like protein 1
  Pfam annotation: Domain name=AP2; Domain location=33-97; Score=115.6; E_value=1.4e-31; Accession=PF00847.10; Description=AP2 domain
MGFGWQPGRRRGVAGRSVSCPTPCAKAKPGRRKNQYRGIRQRPWGKWVAEIRDPVKDVRVWLGTYPTAEAATRAYDRAARRIRGAKAKVKFLPSDTSSSVTVPTAASRSVAACFMGLLCFASHLALFALVHFPLVKLTTHSFTFAMGGGDLFSSPSRGSVRSEFGTVVSPGDSNLGSLLTCADYLSDSDSNSSKEGIAWTRNRTWVTILATASGKSVFAILACCSCSWLMEMDCSIREVKHKSLACRSTGRQLPGRRAGASRDCGVAVAATRDSGTTTDRRRAEPPRHRAQRERERKKKGQGRGLTCGLWGSLAVARWDVGTRTAVDEVMEDLLSLESCLLGEQQMGRGPWQLDGWLSGWTEDLPLKVGQKHGRLLADLEEDEQPKKNVRLGSPATQWISVYNARRPMKQSKHGWTDPVKFSISTLEAWQQSLKCKKTALKTVMLLAERLPIVRWPLLSLPGKHISSSWVLLRPGGTGTHVKCIFRVKGKYKLRPAILETNIIFCVVSLNSCFDGFHFLNTKSKSVFSVLIK

SEQ ID NO: 81145 - protein, 54 aa, Zea mays
  Coding DNA Sequence Number=SeqID_39366
MNVCELTLAVSHTPQVKTRTPVIYKDVTFDPVPLYIICMRLGPSIPGVYVNPGF

SEQ ID NO: 81146 - protein, 57 aa, Zea mays
  Coding DNA Sequence Number=SeqID_39367
MNVCELTLAVSHTPQVKTRTPVIYKVVTFDPVPLYIICVRLGPSIPGVYVSTRVLDP

SEQ ID NO: 81147 - protein, 77 aa, Zea mays
  Coding DNA Sequence Number=SeqID_39368
MNVCELTLAVSHTPQVKTRTPVIYKVVTFDPVPLYIICLRLGPSIPGVYVNPGFWTPKIRVLQKWYQRNVDCRTKPR

SEQ ID NO: 81148 - protein, 68 aa, Zea mays
  Coding DNA Sequence Number=SeqID_39369
MNVCELTLAVSHTPQVKTRTPVIYKDVTFDPVPLYIICMRLGPSIPDVYVNPGFWTPKIRVLQQPPNR

SEQ ID NO: 81149 - protein, 77 aa, Zea mays
  Coding DNA Sequence Number=SeqID_39370
MNVCELTLAVSHTPQVKTRTPVIYKVVTFDPVPLYIICMRLGPSIPGVYVNPGFWTPKIRVLQKWYQRNVDCRTKPR

SEQ ID NO: 81150 - protein, 71 aa, Zea mays
  Coding DNA Sequence Number=SeqID_39371
MNVCELTLAVSHTPQVKTRTPVIYKVVTFDPVPLYIICLRLGPSIPGVYVNPGFWTPKIRVLQRDRSWLDS

SEQ ID NO: 81151 - protein, 93 aa, Zea mays
  Coding DNA Sequence Number=SeqID_39372
MNVCELTLAVSHTPQVKTRTPVIYKVVTFDPVPLYIICLRLGPSIPGVYVNPGFWTPKIRVLQGPNTVFLRCNCGHYSTTHHTQSKIQIRQIS

SEQ ID NO: 81152 - protein, 276 aa, Zea mays
  Coding DNA Sequence Number=SeqID_39373
MAHQSFSGLLETFSLPLSPLCSWIRGLFPAIEFVVAPSSCLPNSVDPEANIAHACLNSGDLTATEEVPELRGAIPPTTRTGIGEETRREDEGEPDCEGPPASASGRSAKRVDALQSRKIVVWMWDKNYTWGQLDPIIPPNIVSYQILTKLGGAGGGGGGSGRLGEHRYPTTIYVGYKRNRLRWGIETRVQQALAIRCLYLSWNNNAVTWGRSESLSVKIEGLCNYRVVKVVAYGQSRSPIPKGHFRHKISKSVKSTFVFRRNMFRPTVNIPLIPLL

SEQ ID NO: 81153 - protein, 196 aa, Zea mays
  Coding DNA Sequence Number=SeqID_39374
MAHQSFSGLLETFSLPLSPLCSWIRGLFPAIEFVVAPSSCLPNSVDPEANIAHACLNSGDLTATEEVPELRGAIPPTTRTGIGEETRREDEGEPDCEGPPASASGRSAKRVDALQSRKIVVWMWDKNYTWGQLDPIIPPNIVSYQILTKLGGAGGGGGGSGRLGEHRYPTTIYVGYKRNRLRWGIETRVQQALAIR

SEQ ID NO: 81154 - protein, 224 aa, Zea mays
  Coding DNA Sequence Number=SeqID_39375
  Gene Ontology: Mol. function=phosphatidylcholine-sterol O -acyltransferase activity; Cellular component=endoplasmic reticulum; Biological process=lipid metabolic process
  Homolog annotation: Hit_ID=Q67U60; Match level="QueryCoverage=56%, HitCoverage=17%, E-value=2e-46, Identity=75%"; Hit description =Putative lecithin diacylglycerol cholesterol acyltransferase
  Pfam annotation: Domain name=KOW; Domain location=181-217; Score =32.8; E_value=1.2e-06; Accession=PF00467.19; Description=KOW motif
MYMAAYDWRLSFQNTEVLFLDGLIQVHDQTLSRIKSNIELMVATNGGNGVVVIPHSMGVLYFLHFMKWVEAPPPMGGGGGPNWCENHIKAVMNIGGPFLGVPKAVAGLFTSEAKDVAVARECLPLILIIRNKLKYALTYREVISILMQRHVLVDGKVRTDKTYPAGFMGMRMPRLGHCLMFDVGNVVMVTGGRNTGRVGVIKNREKQKGSFETIHVLVGAFCYV

SEQ ID NO: 81155 - protein, 224 aa, Zea mays
  Coding DNA Sequence Number=SeqID_39376
  Gene Ontology: Mol. function=phosphatidylcholine-sterol O -acyltransferase activity; Cellular component=endoplasmic reticulum; Biological process=lipid metabolic process
  Homolog annotation: Hit_ID=Q67U60; Match level="QueryCoverage=56%, HitCoverage=17%, E-value=6e-47, Identity=76%"; Hit description =Putative lecithin diacylglycerol cholesterol acyltransferase
  Pfam annotation: Domain name=KOW; Domain location=181-217; Score =32.8; E_value=1.2e-06; Accession=PF00467.19; Description=KOW motif
MYMAAYDWRLSFQNTEVLFLDGLIQVRDQTLSRIKSNIELMVATNGGNGVVVIPHSMGVLYFLHFMKWVEAPPPMGGGGGPNWCENHIKAVMNIGGPFLGVPKAVAGLFTSEAKDVAVARECLPLILIIRNKLKYALTYREVISILMQRHVLVDGKVRTDKTYPAGFMGMRMPRLGHCLMFDVGNVVMVTGGRNTGRVGVIKNREKQKGSFETIHVLVGAFCYV

SEQ ID NO: 81156 - protein, 125 aa, Zea mays
  Coding DNA Sequence Number=SeqID_39377
MELRSIMTNKLRRRAAAFENKSPTVRTVQTTRVNTNYIPPPRQAPIYLVVVEEVPVDLHHLRVENGVILEDSSEEILATPTLLSESQAFAAGASSSAPPTPIAQAPAPGGDDLDDFGDGGEDDEE

SEQ ID NO: 81157 - protein, 129 aa, Zea mays
  Coding DNA Sequence Number=SeqID_39378
VRRFIERRGHQADTRSHSPYAFENKSPTVRTVQTTRVNTNYIPPPRQAPIYLVVVEEVPVDLHHLRVENGVILEDSSEEILATPTLLSESQAFAAGASSSAPPTPIAQAPAPGGDDLDDFGDGGEDDEE

SEQ ID NO: 81158 - protein, 71 aa, Zea mays
  Coding DNA Sequence Number=SeqID_39379
MAQRRLPTVKRGPAARIGRRPPIEGFTDPGSAHRNSVQVHDNQAELPIICSFGEQTRREPVARGGAMVGTA

SEQ ID NO: 81159 - protein, 157 aa, Zea mays
  Coding DNA Sequence Number=SeqID_39380
MVIGSRVDGSDSKSPRVSRGRQIRIRRPEIAVRKLLRSNPSPPHKLHLTARGEIPKLTAVAGTRDGAATTRRRVHRSSRNPVLPSAKPKLKGAARSRGQCEPHGGKLTINNGAETTAHGEARSSCKNWASATNRGLHRPRLRPPKLRAGSRQPGGAP

SEQ ID NO: 81160 - protein, 138 aa, Zea mays
  Coding DNA Sequence Number=SeqID_39381
MSRRGKNPRSLGLIEASANIMVEEKTVKCNKLNRPNMLLLKQALQLDMLLLIPPQIGHVSSVGQAGHYANYCPNRAAYTTPAPMKQGQASGGKSQPLSVNRGQVNHVEAEAEPGEPENREEVLVEGEEVGEEGNEQPD

SEQ ID NO: 81161 - protein, 90 aa, Zea mays
  Coding DNA Sequence Number=SeqID_39382
  Pfam annotation: Domain name=zf-CCHC; Domain location=9-26; Score =30.2; E_value=7.1e-06; Accession=PF00098.13; Description=Zinc knuckle
MSRRGKNPRSCFKCGQAGHYANYCPNRAAYTTPAPMKQGQASGGKSQPLSVNRGQVNHVEAEAEPGEPENREEVLVEGEEVGEEGNEQPD

SEQ ID NO: 81162 - protein, 230 aa, Zea mays
  Coding DNA Sequence Number=SeqID_39383
  Gene Ontology: Mol. function=helicase activity
  Homolog annotation: Hit_ID=Q5NA16; Match level="QueryCoverage=57%, HitCoverage=27%, E-value=2e-15, Identity=31%"; Hit description =Helicase-like protein
MVLSVAELHPQSTNAVIRVRVIRKWEFRGATNDGPLQHINLVLADEQGTPIHAEIVAALAVDKGSLIEIEKVYELKRFRVTPSRNYFKPVDNNFMIQFTLYTQAKVVKDPPQVFPRYIYKLTCFENIEDNIDNRTYLIGQPYLSSTTASSWYFNPGIPEAQTYYNKLQNNDLQLIQPTTAEEEILLSQPPNLEKKTVEELLNIDLDMFPPEGYRCTVTISRIVQNSKWWY

SEQ ID NO: 81163 - protein, 778 aa, Zea mays
  Coding DNA Sequence Number=SeqID_39384
  Gene Ontology: Mol. function=helicase activity; Biological process =viral genome replication
  Homolog annotation: Hit_ID=Q2R0W4; Match level="QueryCoverage=90%, HitCoverage=50%, E-value=8e-88, Identity=36%"; Hit description=AT hook motif-containing protein, putative
  Pfam annotation: Domain name=DUF889; Domain location=470-706; Score =236.9; E_value=4.3e-68; Accession=PF05970.5; Description=Eukaryotic protein of unknown function (DUF889)
MHTLFSGFPPTLRNQLLDSFITAEIPDPGIDPLGYALIAEHMVHGPCGSYNQNSPCMKKGQCSKHYPKKFQNDTVVDTNGFAVYKRSKNNRFVMKSNIKLDNRWIVPYNLTLLKKYQAHINVEWCNKSIFIKYLFKYVTKGPDRSKLYLQRVLDGQDTPIDEETNTRNEVKEYLDARFICPYDSCWRILGYEIHRHFPPVTRLPVHLPNENYITYHASANMSQILSQEFLRRTMLTEWFVANQLHESARSLTYPDFPSEWSFKKRVELMGSSRMTKSGIMPLMRPLRGQRPSQLRDLFVTMLLFCEVGDEFTFFEKVWTLLADDIQYNARQILNHPTYQMSDDALKNQLIEELTTLFSRRGSRIQDFNLPTRSDSPCLVNSNRFIDDELSYDISIMQTESEMMTSRLNNDQLHAFKIITETVLANKAGFYFVSGYGGTGKTYLWNCIITFLRSRKQIVLSVASSGVASLLLPGGRTAHSRFKIPCELEETTNMRLLMPSLSQEERQELSQFSKWMLDVGEGKIDATSQEGEDEPTWIEIPQELLLMPQGDKIACIVHTIYEKLNENYMRLEYLKSRAILTPTNDIVDSINEYIVSLNPEDAREYLSCDKIIKAPNTHESYDLLYPVEFLNTLNGNSFPQHRIILKKGTPVMLLRNLNQSEGLCNGTRLLITSLCDKVIEGQIMTGIHKSKNVLIPRISLTLKNTKWPFVLQRRQYPIKIYQVTMLFTPVAELHPQSTNVVIRVRVIRKWEFRGATNDGPLQHINLVLADEQAFFSMIE

SEQ ID NO: 81164 - protein, 73 aa, Zea mays
  Coding DNA Sequence Number=SeqID_39385
MARLSAVARASARDRVLRSDRGRSSAIGWMRLPCTPSCDNEQSVVPECVAGDFPEQQPGEGKCPPTHYVLLTL

SEQ ID NO: 81165 - protein, 121 aa, Zea mays
  Coding DNA Sequence Number=SeqID_39386
QAAQAHAESRAPTPALGEVHDGVARSRAPANTFGELPSSVHVNRGGGGQMSVFPRAVAGELGETRRGQRKKKALAQALGGFNRGGISGDHRTLLARKAEGKYGGGVTGVASSAWLLPTALS

SEQ ID NO: 81166 - protein, 146 aa, Zea mays
  Coding DNA Sequence Number=SeqID_39387
MGEVCTLQQPRSGTRQPANLLQCCCSLPCAVLDRRWRWPGAQAGSPGDGLYCLGTRSATAPSVTIRDVVKRPDTRRKTERRRFTGVLIGSSRKAEGKYGGGVTRVASSAWLLPTALSGHRRRESQQWWHESRRGAVVSDEAAALAV

SEQ ID NO: 81167 - protein, 213 aa, Zea mays
  Coding DNA Sequence Number=SeqID_39388
MAASEACSWSSSWTEFTTLEVYDLLELNKVNFTYVRPLGGILGKLGQTLSKGRRGALNYNYYLTVVGLWWFNCGGRKDGGAYRRRDCSGEVVEDVGEVSGITTVCGSPSGMAGVGRSTCAGGDARRRRGVRPAHGEIVQLDGSERFTGCQRRYGCKELGGDSPVSSVHARRRRPKSGEVDLGPPVKSGLVRGLGKLHGPLVELAEALARLGGG

SEQ ID NO: 81168 - protein, 143 aa, Zea mays
  Coding DNA Sequence Number=SeqID_39389
MVALRSLIVWVLAVGGCGAEGLGYAEAVEVESVPLDGAGKRGWVDVVFVRCGMVVGDVQGVKQSHYLREADDSNRVLTLQVTALVPTITSMGDPVSGRMRDKVCARLHSEITTLEVYDLLELNKVNFAYISPLGGILGKLGQT

SEQ ID NO: 81169 - protein, 705 aa, Zea mays
  Coding DNA Sequence Number=SeqID_39390
  Gene Ontology: Mol. function=nucleotidyltransferase activity
  Homolog annotation: Hit_ID=Q1SIX1; Match level="QueryCoverage=54%, HitCoverage=82%, E-value=3e-80, Identity=40%"; Hit description =Cytokine, four-helical bundle
MVEGKGGWVRIDVTLIPGCQAPRRPTSLDRGYAVRSRAPDLHPTDCGACLGCAICSPPGVTTAPLKIGYRPGEKFSLRDFHHAVNNLPMDGFLADQHGGSLPIRDVSLTSFFSNKAIYSWATDDISKKVIAICMSAQNTEALRRTLMDAAEQCVAVDFIMLEAEAAFMYGRASENANSFVNRICDLENCVVRRYNPETQVLHGLVKRWLEELKDDKEDTLQAVFVFSDPIIDSVKHIYCNLYASANQITDGFPPCQACKCHGHPIDLFTPSKAKWTCPTTNRQLVVSDIVDTAVRIGEQTVLFLPTLEGSSNLRRVSTSISFVVIERTELASMNEGVIMGRSYVVIPSSNDVEASLADERTDQNTKIFYGLCETLFKLDQGLVCSSSCNIETMKIGTLQCYYLLQPSEKGPMLLRRLAASEEILPLPDMTRDCSSKITMEIRNSIETSLSKIMLKDYNPLHHERGFHSELNRLNSDTWFRVFVFVCCFYHDRSWKHSPNKMSITGPTSFCRSIAPSCAPKDPHNIGSFSEPQVPTCQDLEESMSLNEHEDAAGGLNDHPYSFSEPQPQTSAFITPSKNKASIQSKKGKASPSISEEWEKLIIIDDLDDDFASPAHPRTAVHKPPRPKPPSPVKPLDEKTSRILERLEPPRAKKQRANIVSKASTGAAPAPASKQIKKPLLLPREPSASQPLRPSFSRLRRVPYLT

SEQ ID NO: 81170 - protein, 108 aa, Zea mays
  Coding DNA Sequence Number=SeqID_39391
MVEGKGGWVRIDVTLIPGCQAPRRPTSLDRGYTVRSRAPDLHPTDCGACLGCAICSPPGVTTAPNLDLRLRRRRLNTVVWSGLVEVVPDKNAAFLERAACLTEDRVPL

SEQ ID NO: 81171 - protein, 141 aa, Zea mays
  Coding DNA Sequence Number=SeqID_39392
  Gene Ontology: Mol. function=ubiquitin-protein ligase activity; Cellular component=ubiquitin ligase complex; Biological process =protein ubiquitination
  Homolog annotation: Hit_ID=Q10NB2; Match level="QueryCoverage=92%, HitCoverage=27%, E-value=3e-44, Identity=54%"; Hit description =Spotted leaf protein 11, putative, expressed
  Pfam annotation: Domain name=Arm; Domain location=1-37; Score=10.9; E_ value=0.53; Accession=PF00514.13; Description=Armadillobeta-catenin -like repeat
  Pfam annotation: Domain name=Arm; Domain location=39-79; Score=15.0; E_value=0.16; Accession=PF00514.13; Description=Armadillobeta -catenin-like repeat
  Pfam annotation: Domain name=Arm; Domain location=80-120; Score=11.9; E_value=0.4; Accession=PF00514.13; Description=Armadillobeta-catenin -like repeat
  Pfam module annotation: Pfam domain module=Arm::Arm::Arm; Domain location=1-37::39-79::80-120
MVTIGCSMAIPALVQLLSNGSQRGKKDAATTLFKLCSIYQGNKGKAVRAGLVPILLELLMETESGMVDEALAILAILSGHPEGKAANGAASAVPVLVGVVRNGSPRSKENAAAAMVHLYNGLRLAGGRLPAIVVVEVSGFY

SEQ ID NO: 81172 - protein, 613 aa, Zea mays
  Coding DNA Sequence Number=SeqID_39393
  Homolog annotation: Hit_ID=Q7XI44; Match level="QueryCoverage=19%, HitCoverage=11%, E-value=2e-31, Identity=62%"; Hit description =Putative anther ethylene-upregulated protein ER1
  Pfam annotation: Domain name=DUF1639; Domain location=567-612; Score =49.1; E_value=1.5e-11; Accession=PF07797.4; Description=Protein of unknown function (DUF1639)
MQRMPSSCAFTCLSSDSILRGTTRTKVAGNWRLVKPQTGATKVEEIHSKNHPVSLLIIEYSPFLAVVESKDRRISVALAFAGHQEGYSLYMPFTQKVNRDRYNDGSIKHSLLKQSSLDLLTIETPGLKKNDSFSRWMSKELEEVVDLGIKSTSDSFWSSIETVKVPHGSNVLTNEQLDAYVVNPSLSQDQLFSILDVSPGCAYIGTNTKVSAQFSQGNLCKRFVTGAGIAEADSCASGAGISLGRIPNFIFSKMCTSKQHSALAFFHCLLPCEVSVLCCKIPTILPQYGMTSIIEGIDAIATTWVVVTRDMSNNRRCSGRGGGGRGGGPGNVALAGVRFWILMAPVFMPWLRIKNHALLLQTQYTSFGFYWALLFIPAYKFFAFYMEGPWAAMTTTGIFLAVAVTDWLDGYIARKMQLGTPFGAFLDNSNKYRHCRSITNIARASSTIPLSVSMSSSGSIGTNPALTAFPLLPCTFNHQLHGVFEVASFGGSNIDPTAWEDKKCKGESRFPAQVRIRVRKLCKPLCPVLHHYDGPKFRLELSIAEDRRGLIGRRRRRAEAVIGGQGAQKEKDDDFLAMKGTKLPQRPKKRAKNVDKTLQVLNTWPEIDLILYF

SEQ ID NO: 81173 - protein, 119 aa, Zea mays
  Coding DNA Sequence Number=SeqID_39394
  Homolog annotation: Hit_ID=UPI000034F09D; Match level="QueryCoverage =85%, HitCoverage=5%, E-value=2e-08, Identity=40%"; Hit description =SPK1 (SPIKE1)
MQSNLKYSFSGSSDSHCSLSPLPAYEPAFDWENEMSLIFGQRVPETSSPFAIGSSGTDGATTLFPRRRKADEIDRRFVSIAHRDHDVRADAHLYNALMKANVAADDSGAVLRVFRQVSV

SEQ ID NO: 81174 - protein, 240 aa, Zea mays
  Coding DNA Sequence Number=SeqID_39395
  Gene Ontology: Mol. function=monooxygenase activity; Cellular component=nucleus; Biological process=electron transport
  Homolog annotation: Hit_ID=Q7XI44; Match level="QueryCoverage=90%, HitCoverage=22%, E-value=4e-85, Identity=68%"; Hit description =Putative anther ethylene-upregulated protein ER1
MKANVAADDPGAVLRVFRQVSVTGTFLVNKEHVESHRWSCMFGDVEVPAEVLTDGTLRCYAPAHQSGRVPFYVTCSNMVACSEVREFEYRDSEAHYMDTSRSQANGVNEMHLHICLEKLLTLGPDDHQMLAINSLMLDGKWSNQESSVKEVVSTARVQSLKKLVKEKLHQWLICKVNDDGKGPNVMCKEGQGVIHLVAALGYDWAIRPIIIAGVNVNFRDAHGWTALHWAASLGRYARTH

SEQ ID NO: 81175 - protein, 198 aa, Zea mays
  Coding DNA Sequence Number=SeqID_39396
  Gene Ontology: Mol. function=cysteine-type peptidase activity; Biological process=proteolysis
  Homolog annotation: Hit_ID=Q6H486; Match level="QueryCoverage=69%, HitCoverage=24%, E-value=1e-13, Identity=37%"; Hit description =Epstein-Barr virus EBNA-1-like protein
MESLFVGLSHNKPKNSVATAIVREVLSHDWLLLDYICTQGDLALIDFIKEIPCEPRVEVVLIDDAFVERKWMECLFQPNAYLGDEVIDCYINLIKAQKHLKCRSRGRVHIENAFQFNFLKRDGDVEIKTEELYPNKDMTQICSVERRVLLYLDHDMVFIPINIRETHCYLVVIHARNMEIQVLDSLGTSQDHKDLTDS

SEQ ID NO: 81176 - protein, 305 aa, Zea mays
  Coding DNA Sequence Number=SeqID_39397
  Homolog annotation: Hit_ID=Q109R5; Match level="QueryCoverage=36%, HitCoverage=11%, E-value=2e-13, Identity=37%"; Hit description=Ulp1 protease family, C-terminal catalytic domain containing protein
MEIQVLDSLGTSQDRKDLNDSIKGLQRQIDMISQRKELKDYRWPDLQVASWSLREIDMGYAKQTDSSSFSHFLLNYIEYWIGDELSDSFTQADMSHFRKKMDAILLSSDLNKTRGCLLYKNEKEVDSGSPLDVEILENPTDSKKRKLLHVLDDSEVVYEDENGPITQADLQRWFVDDWDKRAPVKVSNDGCTNDFLMVLMPWKFNGSHALFVIDHVKKHVTFIDFTPTQDWCKHMPYKRFAKAIIMASKNIRLLTATNILDGQRISLSGNIHYPGWSLNEQVLTERLLLRKAFGNTLRNHEPLVV

SEQ ID NO: 81177 - protein, 79 aa, Zea mays
  Coding DNA Sequence Number=SeqID_39398
MALANVGGTRGGLGVASLPQELLITFGSLAVGCRRPFVDQIHGRRRPEKVQFPSKGFTRCSRRSGFHLDRIRRYIRVQL

SEQ ID NO: 81178 - protein, 195 aa, Zea mays
  Coding DNA Sequence Number=SeqID_39399
MEICRRAQEKPRTRKTAHKSTGPIGVPRHQLAPRHEDNSSGSNDPIGDLKAQVEQLRTELRHRNDIWVEDGERINELRTDIRHLQDQLAERDLALDWAVNSRSLAWAKEAKARARVEELSTTVDNLQVYCNTLHEEVHVLYSQLHPNVPADPVGMEAGPSGAPGEALGGELDLFKPPPSMNLVDEWSPTPDRTNL

SEQ ID NO: 81179 - protein, 261 aa, Zea mays
  Coding DNA Sequence Number=SeqID_39400
MAQSLTRGPGPRVILLGRQFLGTERANRRLSKYCASSGPPQKTEKSAAGTDLAVGVTKGGLAVITSASTRKRAATWPEKTISSKVLTVGPDPHGKVLDPCIYGPGLRARVPGFRDKEYPDLNQDQAGVRSRHVFGPCRVRFCSPLRRRPDATTWPTARDVSQRAEPDVRPLGRAASAFIADKPHRLSIPLAGDVPPRHLMGPIHSTGRRCATSAFNEHVHSAGGRRPGHPAGGVPVHSIGRQYTRAVAYTMFIITHVLPRK

SEQ ID NO: 81180 - protein, 190 aa, Zea mays
  Coding DNA Sequence Number=SeqID_39401
MATCIALVTWVSLPLDVHFVRHCLLKGGTYKDTEPRHVGPGAKRKEVTNAYNAWAISERHNVRSAYSIDMPRCFLGNTRVMMSIVYAAARVYCLPMEWTEFRDLAVSGSDPTQRGPGPVPGVRFAPVEVLDLTRRAISNFSTLCKRKVPSPGQVTFKTATKQMHNETEEPIPLPMGGPQKKAMIRNPGVV

SEQ ID NO: 81181 - protein, 141 aa, Zea mays
  Coding DNA Sequence Number=SeqID_39402
  Subcellular localization annotation: CTP_CleavageSite=48; ConfidenceScore=5.27e-01
MALGQTLLRKSPRSHPLTRDENQPLKPKSRRSEAQVALTVSSVEATASAEEASPMATTTSAPTTAATCPPTPHRQVLTPVLATGTRTGPSQNTSAALAAYDVLPPPPGAARRRREDLDVAGPRTARPTPVRRTGSHAPPQR

SEQ ID NO: 81182 - protein, 114 aa, Zea mays
  Coding DNA Sequence Number=SeqID_39403
MGVPAICARRARIKCAAESRWREDSRCSGVAPDSPVLIVDEPLAFPEAGEFLRPTTLGAPDTVRLSRILREKQIGIEMSRIQGLPGGKRIKSYSRDLFMFLYILLIIASGESRI

SEQ ID NO: 81183 - protein, 77 aa, Zea mays
  Coding DNA Sequence Number=SeqID_39404
MESRREGWMNASDGDEDRASKSSSSGWFQGINSEGYLGDVGNCMGVSAWRNFKDPRPTLKYSKAMTKADFYHGKGYR

SEQ ID NO: 81184 - protein, 212 aa, Zea mays
  Coding DNA Sequence Number=SeqID_39405
  Homolog annotation: Hit_ID=Q9ZST3; Match level="QueryCoverage=38%, HitCoverage=15%, E-value=7e-12, Identity=48%"; Hit description =Pyrophosphate-dependent phosphofructokinase beta subunit
MMRGRTRDRWPTTNNKCAATHSTDREEPEITCVNPRGFAAWTTRQGEVRERQRNSGRLERWIRDERRGAHACEEARHQYDAVLASRGEAMESRREGWMNTSDGDEDRASVQTSHLMHTLPLPSILQSNFSVVDGLASSAAGNPDETKLFPNLLGQPSVSMVSLSRILREKQFGIEMSRIQGLPGGKRIKSYSRDLFMFLYILLIIASGESRI

SEQ ID NO: 81185 - protein, 168 aa, Zea mays
  Coding DNA Sequence Number=SeqID_39406
MMRGRTRDRWPTTNNKCAATHSTDREEPEITCVNPRGFAAWTTRQGEVRERQRNSGRLERWIRDERRGAHACEEARHQYDAVLASRGEAMESRREGWMNTSDGDEDRASCALNCPELLQFTAEANAVLYFSNFSTQTKLPSHSKPVYWTLVFHFVVNFQGQYLTGFEL

SEQ ID NO: 81186 - protein, 111 aa, Zea mays
  Coding DNA Sequence Number=SeqID_39407
MDLSFCCQRRALHRGWLRLWSSDCCWWRRNANSRGQQVGRPDGRCHIMTYDSVVPAAAHFSHLLDLAELALDDAATKSMLTEVDSASSSARRTPSSLLRTVISQRDVLSAA

SEQ ID NO: 81187 - protein, 59 aa, Zea mays
  Coding DNA Sequence Number=SeqID_39408
VVPAAAHFSHLLDLAELALDDAATKSMLTEVDSASSSARRTPSSLLRTVISQRDVLSAA

SEQ ID NO: 81188 - protein, 129 aa, Zea mays
  Coding DNA Sequence Number=SeqID_39409
  Subcellular localization annotation: CTP_CleavageSite=37; ConfidenceScore=5.24e-01
MQAACNRAKWARPSDFQCTQHGGPHPRVMQLAHRSLRASNCTATRITATPPRLRNQYHDSRQPSRTRNGRPANHSPRRINSAACGASGRGSERRFAFAIMTASKKRDRERGIPQKGPFSVKETGSEPPY

SEQ ID NO: 81189 - protein, 117 aa, Zea mays
  Coding DNA Sequence Number=SeqID_39410
MTGGRLLRRAGGWFPPPEAGRGGGQPTRAGGRAPARLALCLSKDGGASGRGSERRFAFAIMTASKKGPGKGDTPKRILLREGNRLRASLLIRGSKADPTGGFNSRLRARGFCTLKVA

SEQ ID NO: 81190 - protein, 366 aa, Zea mays
  Coding DNA Sequence Number=SeqID_39411
  Homolog annotation: Hit_ID=Q6QP51; Match level="QueryCoverage=13%, HitCoverage=21%, E-value=2e-09, Identity=64%"; Hit description =Putative growth-regulating factor 1
MDERYQLPRSCVPPMTRRKDGEYPPSGGLEGGKTRCTREREDMVAFQGGHPPFKGGSPYLRPQPSRAESSPTRSKVFPYGAGAGSHTSCKPAQSRRSQIAVRGAYNRPVAHASCNRRAECFVHATAPPLAPPPRLLDYGTDTATRGDPEHDPEAPAWRDDQCGQKWVGSGASGRRSERRFAFAIMTATKKAGPSEGFDSRLRSRGPYTHYWSEVRRPAPRKGSTTASGYSGSAPTTDQGGNDLVTESHQREASSPRTPSPGDRVRQITRSSPETPCSAPIKGNMALSPLLLAERRRRGICKKVESVPDRPLTLCRGSGAALANLAPVELLTASTYQPENLGPDRTPGLRPARMRERPDQPKHYARH

SEQ ID NO: 81191 - protein, 237 aa, Zea mays
  Coding DNA Sequence Number=SeqID_39412
MAEVKRRLLRLPKVPSVLPQSFHAGRVEVERVCPLGAVACRLHGGRPFHPLVWAKVEECFPAASPCRWSPKTVTTSLKVGRSKPGCGLCPALSFKDLHHPCWGGGRGEPELYLPHGSAGHLFFHLLGVATILQLCGGGALQPCRGRTEDLPVRFGAADARWCGVGGQVDAAVGAEVVAAGESFSADETVSATRGPTSGSLALMSGSRPLSGDANESLSAAASVQGPSLLLKRSLASH

SEQ ID NO: 81192 - protein, 195 aa, Zea mays
  Coding DNA Sequence Number=SeqID_39413
  Subcellular localization annotation: CTP_CleavageSite=82; ConfidenceScore=5.00e-01
MKRATFHLRHDDRFKKGVRRLRLAGSNSRPRALGPPSPPTDQGFKGCALRGPAAAREHSGSTPITDQGSKAGPSKGFDSRPRSRRVRDDPRYVRYMAEARATLPRYPRTFPRPAGTICNGIPPEGGTEPLDPIEMGPGLANPLQRLGGCPRTWLWPKLLTTSTNQLKSSEPDRAPGLRPGRMREQPGRPRHHNKN

SEQ ID NO: 81193 - protein, 269 aa, Zea mays
  Coding DNA Sequence Number=SeqID_39414
  Subcellular localization annotation: CTP_CleavageSite=53; ConfidenceScore=5.14e-01
MKETGPRALLLIRGSKAAPCGVQQPPQSTRAPSPPTDQGFERLRPTGSSSHPRALGPPSPPTDQGFEGCALRGPATAPEHTGPRALLLIRGVRRLRLAGSNSRPRALGPPSPPTDQGFKGCALRGPAAAREHSGSTPITDQGSKAGPSKGFDSRPRSRRVRDDPRYVRYMAEARATLPRYPRTFPRPAGTICNGIPPEGGTEPLDPIEMGPGLANPLQRLGGCPRTWLWPKLLTTSTNQLKSSEPDRAPGLRPGRMREQPGRPRHHNKN

SEQ ID NO: 81194 - protein, 212 aa, Zea mays
  Coding DNA Sequence Number=SeqID_39415
MKTLTTFCGYHPLEMVMHPLGLFTVEKKDDPMWCNPCEPCEGCVGNALQSDTMTHLANIAQTTKLTLDSREDFVVNLSSELVENDLQVERLSQRIATLEQQVEIRDNCNTLNLGRKPSGMSPRGTLVVAFMPLHDRDSLLSFEESTIKHGDQVIELFEFYEIEDPEHLFGEGKDVWFTGGDEEDGYDYAYGNGKEGVEADLQEFQDFDEFED

SEQ ID NO: 81195 - protein, 382 aa, Zea mays
  Coding DNA Sequence Number=SeqID_39416
  Homolog annotation: Hit_ID=Q6QP54; Match level="QueryCoverage=17%, HitCoverage=24%, E-value=1e-15, Identity=69%"; Hit description =Putative kinase
  Subcellular localization annotation: CTP_CleavageSite=54; ConfidenceScore=5.09e-01
MDVHSDYPLAAHRRHHVRCPSRRLGGCSRKPGSGRTVDSVNIPAQELGPRPYTRATASSHEGTTRPAEALRKALRPRRSETTPPRPRGLHPAGALARTHRNQMQPRKAGPLAKKCDESLQASANTPFEARGLLSGTIIRGTLKTPNSQLVTPISIKLQRPDGARTRAKPRKTTNSASPDPGLGLGLRPRKTTNSDSPNPRGSDSASADDLRLARPRGSDSASADDLRLARPRGSDSASADDLRLARPRSSDSASADDLRLARPRGSDSASADDLRLARPRGSDSASAMEDRLDPGFGGASTSPNLGHRPATSTGSTIITLPRADSGRREQDRATSARTQPFQQLSLCQTPSLLRQPRHHASRVPRSLRLPHWHVLRALALPR

SEQ ID NO: 81196 - protein, 35 aa, Zea mays
  Coding DNA Sequence Number=SeqID_39417
MGTEHGVSGELQAGLDASLRWDSVTRSFPLVSEMS

SEQ ID NO: 81197 - protein, 133 aa, Zea mays
  Coding DNA Sequence Number=SeqID_39418
  Gene Ontology: Mol. function=branched-chain-amino-acid transaminase activity; Cellular component=chloroplast; Biological process =branched chain family amino acid metabolic process
  Homolog annotation: Hit_ID=Q94LV4; Match level="QueryCoverage=86%, HitCoverage=32%, E-value=5e-33, Identity=79%"; Hit description =Putative aminotransferase
MRLAIYDERVYSIYRLLHQDNVISTPAIKGTILPGITRKSIIDVALSKGFQVEERLVSVDELLDADETYLAMISLHVREFTLQSGIRPPRCWRCVPAAVHFTDESSDGSNRGLDGLDCATELVGRGSWIIPNR

SEQ ID NO: 81198 - protein, 353 aa, Zea mays
  Coding DNA Sequence Number=SeqID_39419
  Gene Ontology: Mol. function=branched-chain-amino-acid transaminase activity; Cellular component=chloroplast; Biological process =branched chain family amino acid metabolic process
  Homolog annotation: Hit_ID=Q6AT43; Match level="QueryCoverage=91%, HitCoverage=94%, E-value=1e-139, Identity=73%"; Hit description =Putative aminotransferase
  Pfam annotation: Domain name=Aminotran_4; Domain location=96-307; Score=95.2; E_value=2e-25; Accession=PF01063.9; Description =Aminotransferase class IV
MEYGAVLAAAPLVARPNWLLLSPPPLAPSIQIQNRLYSISSFPLKAGPVRACRALASNYTQTSETVDLDWENLGFGIVQTDYMYIAKCGTDGNFSEGEMVPFGPIALSPSSGVLNYGQENAERMRTGAERMCMPAPSVEQFIDAVKQTVLANKRWIPPTGKGSLYIRPLLMGSGAVLGLAPAPEYTFIIFVSPVGNYFKEGLAPINLIVEDKFHRATPGGTGGVKTIGNYASVLMAQKIAKEKGYSDVLYLDAVHKKYLEEVSSCNVFVVKVEERLVSVDELLDADETYLAMISLHVREFTLQSGIRPPRCWRCVPAAVHFTDESSDGSNRGLDGLDCATELVGRGSWIIPNR

SEQ ID NO: 81199 - protein, 154 aa, Zea mays
  Coding DNA Sequence Number=SeqID_39420
MPTSSSSAAATPPADASSEEMLSTLVAEELRADDTVDFGVSRMSPVRVQDMQRLGYFGGGVARVPRTEEVPEPEGELVVFEAFFAAGLRLTAHRFVGEVLRRFNVQIHQLTPNAVVALSKRIDEDMCGPGGKDVFARAPGVFGADDEGYRGLVA

SEQ ID NO: 81200 - protein, 160 aa, Zea mays
  Coding DNA Sequence Number=SeqID_39421
  Gene Ontology: Mol. function=oxidoreductase activity; Cellular component=integral to membrane; Biological process=electron transport
  Homolog annotation: Hit_ID=Q9LGS8; Match level="QueryCoverage=86%, HitCoverage=27%, E-value=1e-46, Identity=65%"; Hit description =Putative cytochrome P450
MLVFGYATKEADEAMLFRHMVPSKLWKVLSWLNVGTEKKLANVKVVVDQFIYKEIYKRKAWGSNKSQADVLSMYTKLSLDPSMSEQQKTDFLREMVVGFIIARKDLIVVKLTWFFYMMCKHPKVEAMILEELKDLQSCRWPGFWTHNRTSLGSSKLLWRT

SEQ ID NO: 81201 - protein, 225 aa, Zea mays
  Coding DNA Sequence Number=SeqID_39422
  Gene Ontology: Mol. function=oxidoreductase activity; Cellular component=integral to membrane; Biological process=electron transport
  Homolog annotation: Hit_ID=Q9LGS8; Match level="QueryCoverage=52%, HitCoverage=23%, E-value=5e-36, Identity=65%"; Hit description =Putative cytochrome P450
MVPSKLWKVLSWLNVGTEKKLANVKVVVDQFIYEEIYKRKAWGSNKSQADVLSMYTKLSWDPSMSEQQKTDFLREMVVGFIIAGKDLIVVKLTWFFYMMCKHPKVEAMILEELKDLQSCITVMWLKQVSLLFLSNQISSLPASVFEWARLSRLQVHRTTVWLAEPAVRMRLMALLVDGCRGLSSGAMDGVIHGQAHTEIQCFRSLRADYCAGCARRCLRWSGAGC

SEQ ID NO: 81202 - protein, 198 aa, Zea mays
  Coding DNA Sequence Number=SeqID_39423
  Gene Ontology: Mol. function=cysteine-type peptidase activity; Biological process=proteolysis
MRWTGASLFSMIYAKLPRSGNTRSVTNVSTTIYGCSIVILLYYLDHLHDSAAPQNKRGTPRIKYFDRNIIQALTRADKGKIRKGEEPFGHCSHKTRTNTFDVPRPDPSGQHTIHIELPLIWDLISSKLNQLPFRHRLGFIEKLSHFDTEIVEKQYNLSDVFGELIDEVLRAESGDNEDGYDVQKTTSKSDDILPQTVG

SEQ ID NO: 81203 - protein, 417 aa, Zea mays
  Coding DNA Sequence Number=SeqID_39424
  Gene Ontology: Mol. function=cysteine-type peptidase activity; Biological process=proteolysis
  Homolog annotation: Hit_ID=Q53MK8; Match level="QueryCoverage=54%, HitCoverage=23%, E-value=6e-22, Identity=30%"; Hit description=Ulp1 protease family, C-terminal catalytic domain, putative
MKNVDRPPSNPKRIIIQSTQECFSVDIPRVPAETVRHETRQAADEDDDFMPLSKKRNFDDSPGKVLKKVVTKRRKVVDPPRQQRLNVRCNPQDVLVSIQILNDRQRQAIARRGFSRILDIRLDALGSRSHLAWLMEKLDHNDMTIRAGPGKELKITKDTVHLILGLPNAGGGTALGIDEAVAANNLRAELGLSKEDFGVAALQDRLRKGSDDDLSIRSFFLILFNRLLFPTASWGITNHEVLLTEEMDRFDQMDWCQLIFNDLCQAAKKWHTRSVTNVSTTIYGCSIVILGKHGDGGKNMPTNTNVTPKATPHMEPDAPIFDATPQIKPLFNLEEQEGPSGNPQPLEESVFHTFLTNSLPETGGMGPMQSDHGSHGKQGALDIGNTSEIWSLALHYITFHPKNKALSLLEDIQRFKV

SEQ ID NO: 81204 - protein, 68 aa, Zea mays
  Coding DNA Sequence Number=SeqID_39425
MKNVDRPPSNPKRIIIQSTQECFSVDIPRVPAETVRHETRQAADEDDDFMPLSKKRNFDDSPGKSLEE

SEQ ID NO: 81205 - protein, 368 aa, Zea mays
  Coding DNA Sequence Number=SeqID_39426
  Homolog annotation: Hit_ID=Q75GP1; Match level="QueryCoverage=23%, HitCoverage=24%, E-value=8e-23, Identity=67%"; Hit description =Expressed protein
  Pfam annotation: Domain name=RRM_1; Domain location=285-350; Score =11.3; E_value=0.013; Accession=PF00076.12; Description=RNA recognition motif. (a.k.a. RRM, RBD, or
  Subcellular localization annotation: CTP_CleavageSite=12; ConfidenceScore=5.02e-01
MVKKNIISTTTYVSNVGVHTIRFCRSLTHAHGSSRQHPSPPPQISPLADLMPTPALPPPALPLFPRRLAADLDPANLALATTAHAPTRDGSSPPCPSHHNRAAPSPAEPETSELAVEAMPLGDGAEVADFMLPDELLVALTWDPYKQLDLTCRITALAVSGRVSGLERETGRLRAEAAGKDRENTELRERVVLLDTALQETNARLHPPMLTMADLPTGTRDLAREFRFPPGWFLEGSKPGDASAVALSGSERYPFVGSNSTVPLATGMTDTATVLPLPDIGIKDATTKAVGLAASVHALVSTMIGLGVSPATLFMEPKGFGFIQYFDPEDASDAKYHMDGKMLLGREIAVVFAEENRKKPSDMRAREK

SEQ ID NO: 81206 - protein, 131 aa, Zea mays
  Coding DNA Sequence Number=SeqID_39427
  Homolog annotation: Hit_ID=Q7XI49; Match level="QueryCoverage=33%, HitCoverage=20%, E-value=1e-08, Identity=71%"; Hit description =Putative SC35-like splicing factor SCL30a
MLLGREINVVFAEENRKKPSDMRAREKISGRGCSYDRRLRSRSPGLNDSPRGRSRSQSRSYSPALKQKHCSSTLVCTLGYLNVYYVLGIPKSLMSEVGCEPMNLDVGRADQADRSYSSVGCRSLVALLLSR

SEQ ID NO: 81207 - protein, 137 aa, Zea mays
  Coding DNA Sequence Number=SeqID_39428
  Gene Ontology: Mol. function=transporter activity; Cellular component= intracellular; Biological process=transport
  Homolog annotation: Hit_ID=Q1EPB6; Match level="QueryCoverage=51%, HitCoverage=11%, E-value=1e-17, Identity=65%"; Hit description =Phosphatidylinositol transfer protein, putative
MELPLDAQSSGRRLDVDEHVEQCRAVDDVLHVLARFVLVLQMQHLRGELRVISFKEEKRYKGQEVLNDEANYGRQIVTISSIDGKIIRYARPNHPTRKGSDASAESGSEVEDVTSPTASRNLITHPILTPVHEEASG

SEQ ID NO: 81208 - protein, 505 aa, Zea mays
  Coding DNA Sequence Number=SeqID_39429
  Homolog annotation: Hit_ID=Q5Z852; Match level="QueryCoverage=18%, HitCoverage=20%, E-value=2e-30, Identity=50%"; Hit description =Putative meiotic serine proteinase
  Pfam annotation: Domain name=Asn_synthase; Domain location=133-323; Score=-60.9; E_value=0.0032; Accession=PF00733.11; Description =Asparagine synthase
MFTLRRAGALPSRCRDIFRPFRALAWLLDAFASATFDQIDSAYREAGGDPFVAATPPRAFIVAVNRSLALTSPKRDTVVRVPYKVSIPLGRVKTATPGGNKGRPEQKYVQASSSCSWASLGTRCPCTNWRRPSSRQTFGAGSTDSHVPFGVLLSGGLDSSLVAAVAVRHLAETEAARRGGTKLHSFCVGLEGSPNLKAARTRTCRSPCRHRISRQGQAAPPHAFVVVVDRSLALTSPKRDTVVRVPYKVSIPLGRVKTATPGFEFWFMGFVRYQVSLHELEKAIEQANLRGWIHRLSFGGLTLCFCVAIRSLEKAIELLNKRKVQGRILLCGYSFNYISGTASIKKDLIDYYNSSTIRDWAGRATAFKATADFSFQDADVLKLKLDILAPSNLIWAAWAPNGTDESNYAVNCQNFLVANAIVLKVAKDLTKRVLNDEANYDRQIVTISSIDGKIIRYARPDHPTRKGSDASTESGSEVEDVTSPTASRNLITHPILTPVHEEASG

SEQ ID NO: 81209 - protein, 172 aa, Zea mays
  Coding DNA Sequence Number=SeqID_39430
  Gene Ontology: Mol. function=protein serine/threonine kinase activity; Cellular component=calcium- and calmodulin-dependent protein kinase complex; Biological process=protein amino acid phosphorylation
  Homolog annotation: Hit_ID=Q8RY07; Match level="QueryCoverage=30%, HitCoverage=8%, E-value=4e-19, Identity=90%"; Hit description =Serine/threonine protein kinase pk23
  Pfam annotation: Domain name=WD40; Domain location=43-82; Score=17.4; E_value=0.052; Accession=PF00400.22; Description=WD domain, G-beta repeat
  Pfam annotation: Domain name=WD40; Domain location=87-125; Score =17.3; E_value=0.056; Accession=PF00400.22; Description=WD domain, G -beta repeat
  Pfam module annotation: Pfam domain module=WD40::WD40; Domain location=43-82::87-125
MELCEGGELLDRILSRGGRYNEGDAKIIVEQILKVVAFCHLQGVVHRDLKPEGDQGVNATQWLHNEPVLVTVSGDSSVGMWDVTLGQPCVRHIVAHTRCANAVAVAPNDKYLCTGGSDQKVAVAPNDKYLCIGGSDQKVVSCLFVLLVSYVAYVMSYWKREGPQLSEIPVFL

SEQ ID NO: 81210 - protein, 216 aa, Zea mays
  Coding DNA Sequence Number=SeqID_39431
  Homolog annotation: Hit_ID=Q8RY07; Match level="QueryCoverage=30%, HitCoverage=8%, E-value=7e-16, Identity=70%"; Hit description =Serine/threonine protein kinase pk23
  Pfam annotation: Domain name=WD40; Domain location=102-140; Score =14.2; E_value=0.49; Accession=PF00400.22; Description=WD domain, G -beta repeat
  Pfam annotation: Domain name=WD40; Domain location=58-97; Score=19.8; E_value=0.0098; Accession=PF00400.22; Description=WD domain, G-beta repeat
  Pfam module annotation: Pfam domain module=WD40::WD40; Domain location=102-140::58-97
MELCEGGELLDRILSKYYIFLRNHFANTTTRGGRYNEGDAKIIVEQILKVVAFCHLQGVVHRDLKPEGDQGVNATQWLHNEPVLVTVSGDGSVGMWDVTLGQPCVRHIVAHTRCANVVVVAPNDKYLCTGGSDQKVVVAPNDKYLCTGGSDQKVVSCLFVLLVSYVAYVMSYWKRDKNVGTHVLKVKNVGTVELNVQPTQTHVGHISSTATRPRRT

SEQ ID NO: 81211 - protein, 75 aa, Zea mays
  Coding DNA Sequence Number=SeqID_39432
MRVIWDALGQVIREVLCWVLVFGHWETEASVMAPIFSLRDLGTGIVPRLFPEGRGKEEGVEADLQEFQDFDEFKA

SEQ ID NO: 81212 - protein, 75 aa, Zea mays
  Coding DNA Sequence Number=SeqID_39433
MRVIWDALGQVIREVLCWVLVFGHWETEASVMAPIFSLRDLGTGIVPQLFPEGRGKEEGVEADLQEFQDFDEFKA

SEQ ID NO: 81213 - protein, 77 aa, Zea mays
  Coding DNA Sequence Number=SeqID_39434
MNVCELTLAVSHTPQVKTRTPVIYKDVTFDPVPLYIICVRLGPSIPGVYVNPGFWTPKIRVLQKWYQRNVDCRTKPR

SEQ ID NO: 81214 - protein, 77 aa, Zea mays
  Coding DNA Sequence Number=SeqID_39435
MNVCELTLAVSHTPQVKTRTPVVYKDVTFDPVPLYIICVRLGPSIPGVYVNPGFWTPKIRVLQKWYQRNVDCRTKPR

SEQ ID NO: 81215 - protein, 191 aa, Zea mays
  Coding DNA Sequence Number=SeqID_39436
MGCAMYFLWWAEFRYCSPDAIVDITPQLITLNQRSKSDKYRKDKHSSSQISIKIVLFLFLRVGLLFLKVILGIGFQSVKSNFVFRRKRFRPTINIPLIPLLSHPDFRGPKPGHEHNHQETTVQQPKVDWETTAYTTHEFITSSSMRLILRYLFLACGGCETARVSSHTFIAQQVVGNNVHELAKYGSSREV

SEQ ID NO: 81216 - protein, 128 aa, Zea mays
  Coding DNA Sequence Number=SeqID_39437
MDRAIPAIPDVKPYLDVTARVSPSQPHPSPDLPRRRDNLEKPYKNNPKVKTPPPLGITNVLLDTRAIQITYVYSQQKPKLKDCNLADGEYILVPEQGAAQEVVPDPAPESAPEDLSATALEGKPRFYA

SEQ ID NO: 81217 - protein, 284 aa, Zea mays
  Coding DNA Sequence Number=SeqID_39438
  Subcellular localization annotation: CTP_CleavageSite=70; ConfidenceScore=5.36e-01
MEETHLHVFDAFCPHQSTPARAPACLAPRPSQPNAVARSRAYKPSQASATLFRAPSKPHRSLARRRLPVRSESAAAQSLCHRRPANRAIPNPVQPSEKIVRPSVKLPERGIGVCFAGEASPRSSELSTPPEYVDRVNHSTILRFLVHTVATLHREAHRALGLNQFAVVWPVHSPPTSTPVCARGPGDSGHPRRQAVPRRDRQSLPEPTPPFTGPPSLPDTRAIQITYVYSQQKPKLKDCNLADGEYILVPEQGAAQEVVPDPAPESAPEDLPATALEGKPRFYA

SEQ ID NO: 81218 - protein, 77 aa, Zea mays
  Coding DNA Sequence Number=SeqID_39439
MEKDRQVAQRKKRRAQVRLADPRREVKMTRPSMKTSSLDAGAESGQLAVVPAALYADPMAVATRTKGDTGAPGGPMV

SEQ ID NO: 81219 - protein, 492 aa, Zea mays
  Coding DNA Sequence Number=SeqID_39440
MGQIAHGPLPVLRGTRSYGLRGVFVLACRSEEGRIGLRMDGVRSLSGGACRSGLRSVQFRETLAFTIARLPSLLVLRRRSGPYQANHVPPPTPNHTMEFETSRIFLGHVLEMQRLSYFGNGVGRAPGGEEVPEPEGELIVFEAFFTAGLCLPTHRFVVEVLRMFKKRKIGDKIAKFGSCTFTPRTARTSDEVVEIVLYARNKWGNWWDFWFYVAPGDVKGLSSLPPAILCSHCYVAFPRFEVAKEDEDEGALRYAACLSSERNLVEEFIDYGMVRSPVFTVDLRGRDASAFVHEVEAEAVKIVGKKRKLGTAAEDFGLRAFDHFVVDLLETCAALGIFGENAKVMEKDRQVAQRKKRRAQVRLADPRREVKMTRPSMKTSSLDAGAESGQLAVVPAALYADPMAVATRTKGDTGAPGGPMAAAFAERIASGALTLEFSSERQRLEGRIEHLRTPHTEAVRDKSTAENKSRNFLENLTTTKIEKENPSRRLAE

SEQ ID NO: 81220 - protein, 372 aa, Zea mays
  Coding DNA Sequence Number=SeqID_39441
  Homolog annotation: Hit_ID=Q6QP51; Match level="QueryCoverage=40%, HitCoverage=91%, E-value=9e-20, Identity=46%"; Hit description =Putative growth-regulating factor 1
MASGQTLLLKGPRSRPLTGDENQPLKPKSQSLTYGDHHLRTDDSGHLPTNTAPAKGQTATQETCDRTTVVHPGGFVASGGPAWRPGPTRHGKRHLRQAKWAPFHLRHDDRVKKRPRALLLIRGSKVAPSGVRRPPQSTRAPSPLLIRGSKAGPSEGFDSRPRARRVRDDPGYVRYMAEAQATLPRGSRAALAPGYGQTVDHVNKSALGLGRRSPPHPTPGLSLSLSLGRSHNLTRPQPRPQEKSPPHPTWASDRLRYRGYIITLPLASRLRLRRNKTGVPSKVTPVTGNDGSPRAPMTSVALNPLRKQGNVSRIHAAPPAMLQQSSRHFSDSHVSTRIGLKALLHQPRSGRVPPSIGPKVPATESPGTYSAQ

SEQ ID NO: 81221 - protein, 168 aa, Zea mays
  Coding DNA Sequence Number=SeqID_39442
  Homolog annotation: Hit_ID=Q6QP51; Match level="QueryCoverage=35%, HitCoverage=27%, E-value=1e-08, Identity=55%"; Hit description =Putative growth-regulating factor 1
  Subcellular localization annotation: CTP_CleavageSite=35; ConfidenceScore=5.14e-01
LSLGLGRRSPPHPTPGLSLSLSLGRSHNLTRPQPRPQEKSPPHPTWASDRLRYRGYIITLPLASRLRLRRNKTGVPSKVTPVTGNDGSPRAPMTSVALNPLRKQGNVSRIHAAPPAMLQQSSRHFSDSHVSTRIGLKALLHQPRSGRVPPSIGPKVPATESPGTYSAQ

SEQ ID NO: 81222 - protein, 655 aa, Zea mays
  Coding DNA Sequence Number=SeqID_39443
  Gene Ontology: Mol. function=helicase activity
  Homolog annotation: Hit_ID=Q1EPC6; Match level="QueryCoverage=75%, HitCoverage=31%, E-value=1e-136, Identity=50%"; Hit description=DNA helicase homolog, putative
MTVEQKNDKSRKRREVIHLGPVSLSDGCSTIDFTNFATQDGNEKINVNQDDDSDWLHRNETFKANDVFTTRDLLTPGGEHETVGNTSNHNLEKAAYFRERYKNLTPAEREFRRERLRLYNSTPKRKGSKIEYIRKRRALLADTLSHESIAMESPTYTPEVVHPTTDAIEPDGSAVTPCDWVIPEIASNPFLPASTQTEDANSLHMSIGPLRRKQHVPHGERQSILARRNRQFEASISRNMATATDDTINDAGEGDDWTQPHMTAKINNNVQCRSQCHGAIVATNESASMPEQGSGVDHTQSKPRVISNVDDDDGVVFEDDADENEGYLFAGQYEDTDEDIEVDGSQDESTATDVPDPYDKVYSNIPEETHMLKTVPNCGYCTAKKFEYETPGFCCRGGKVELAPLETPPQLKRLWDSADSDARHFRDNIRFFNGHFSFTSLYCCLDSMTTNVRDSGIYTFRAQGMMYHNIKSFGRDGGAEHKHLELYFYDDDPTLEHRYRKCREEHQQKDKEVIRQIVDILRGNPYSEHLRTMGHVENLDDYRIALNLDQTLNQKTYNTPLTSEVAAIWIEGSEGRGQFSKSVMLHGKDSSSHCIRSYHGCYDALSYPLFFPRGELGWHANIPKVGVSMDEVDAYRATHRGGQNEIDTEKPNRTK

SEQ ID NO: 81223 - protein, 2182 aa, Zea mays
  Coding DNA Sequence Number=SeqID_39444
  Gene Ontology: Mol. function=helicase activity; Biological process =viral genome replication
  Homolog annotation: Hit_ID=Q1EPC6; Match level="QueryCoverage=73%, HitCoverage=99%, E-value=0.0, Identity=65%"; Hit description=DNA helicase homolog, putative
  Pfam annotation: Domain name=DUF889; Domain location=1280-1516; Score= 460.1; E_value=2.8e-135; Accession=PF05970.5; Description=Eukaryotic protein of unknown function (DUF889)
  Pfam annotation: Domain name=Peptidase_C48; Domain location=1627 -1806; Score=-21.3; E_value=0.022; Accession=PF02902.9; Description =Ulp1 protease family, C-terminal catalytic domain
  Pfam module annotation: Pfam domain module=DUF889::Peptidase_C48; Domain location=1280-1516::1627-1806
MESPTYTPEVVHPTTDAIEPDGSAVTPCDWVIPEIASNPFLPASTQTEDANSLHMSTGPLRRKQHVPHGERQSILARRNRQFEASISRNMATATDDTINDAGEGDDWTQPHMTAKINNNVQCRSQCHGAIVATNESASMPEQGSGVDHTQSKPRVISNVDDDDGVVFEDDADENEGYLFAGQYEDTDEDIEVDGSQDESTATDVPDPYDKVYSNIPEETHMLKTVPNCGYCTAKKFEYETPGFCCRGGKVELAPLETPPQLKRLWDSADSDARHFRDNIRFFNGHFSFTSLYCCLDSMTTNVRDSGIYTFRAQGMMYHNIKSFGRDGGAEHKHLELYFYDDDPTLEHRYRKCREEHQQKDKEVIRQIVDILHGNPYSEHLRTMGHVENLDDYRIALNLDQTLNQKTYNTPLTSEVAAIWIEGSEGRGQFSKSVMLHGKDSSSHCIRSYHGCYDALSYPLFFPRGELGWHANIPKVGVSMDEVDAYRATHRASNANDEDAESPSHLCVSVRDYYCYKFQIRPGVFNPILHGKRLFQQFAVDTYIKIENSRLDYIRKNQDRLRADLYQGLVDSMLDGDIRGEKVGKRTVLSTSFIGGPRDMRRRYMDAMALVRKFGKPDIFLTMTCNPNWDEIRRELLPGQTPQDRSDLVVRVFHAKLQELKHRLTKQDILGKVRAYVYVVEFQKRGLPHAHFLLIMQRKYKLTCPEQYDLLISAEIPSNKYPELRKMVIKHMMHGPCGSLNPNCPCTKGRKSCKNHYPRPFSDTTLQGKDSYPIYRRRDDDRKEKVRGCELDNRWVAPYNPYLLRLFNCHINVEACGSIKAVKYLFKYIYKGHDRASVVMRDASKADDDVDEIKQYRDARWVTPPEALWRIYGFELSQISPPVMQLQLHLPNMHMVAFHERQMVERVVNRPGVDRSMLTSYFEANRLHEEARGILYRDFPEWYTWQSGKGKVWQQRKRDTGGQVGRIVSAHPAEGERYYLRVLLNHVTGAASYVDLRTVDGVTLPTFREAAERRGLLESDNTLDECLTERALFQMPSSLRRLFATILVYCEPSDVAVLWQKHKDSMSEDYQHKSQNKTHVEQMVLIDIRNMLQSMGKDIKTFPLPPMIDAYDDAIGTAREVYEEESIQPTVEDVALKDSLNEEQRAAYDKIMSAVDTDQGGLFFVDGPGGTGKTYLYRVLLATLRNQGKIAVATATSGVAASIMPGGRTAHSRFKIPLTIDDGAVCSFTKQSGTTELLRKASLIIWDEASMTKRQAVEALDNSMRDIMGRPALPFGGKTIVFGGDFRQVLPVVRKGSRAQVVASSLRMSYLWESMSHLKLVSNMRAKNNPWFAEFLLRVGGGTEETNSDGDIRLPDDVCVPYSGSDNDLDNLIDFAFPNLNENMSDSTYITSRAILSTRNDWVDMINVKMIDRFQGEHMVYHSFDSAMDDPHNYYPPEFLNTLTPNGLPPHVLKLKIGCPVILLRNIDPANGLCNGTRLVVRGFQRNSIDAEIVLGQHVGKRIFLPRIPLCPSDEEMFPFQFKRKQFPVRLSFAMTVNKAQGQTIPNVGVYLPEPVFSHGQLYVALSRATARSNIKILVIPAVDGRKKSRKGVKKTPTVDCGTYTKNIVYKEEIPCEPRVEVVLIDDAFVERKWMECLFQPSAYLGDEVIDCYINLIKAQKHLKCRSGGRVHIENAFQFNFLKRDGDLEIKTEELYPIKDMAHICSAERRVLLYLDHDMIKGLQRQIDMISQCKELKDHRWPDLQVASWPLREIDMGYAKQTDSSSCGLFLLNYIEYWTGDELSDSFTQDDMSHFREKMAAILLSSDLNKRRGCLLYKNEKEVDSGSPSDVEILENPTDSNKRKLLHVLDDSEVVYEDEEGPITQADLQRWFVDDWDKRAPVKVSTDGCTNDFLMVGLSTKDMPVTKADSIDVLCDYIMAIEDDTTLERTWVRSFNPFKIEISVKDLQNILTTTQDMILRCFDMAVRLLANKESRRPKEEIINNRKHYMDMRFWRMVGFGKLPKYHQDPTTEELAKTLDCWPSMNYYITGCRYVLMPWKFNGCHALFVIDHVKKHVTFIDFTPTQDWCKHMPYKRFAEAIIMASKKYKIAYSKKRSGWAEDIFKWEHTIQTGVPIDLRGFNTSYLVLQAMAMWGNDRRLKFVGDAKTLRRNFVIDLLSYEDNSCRYAIPANIQQRLIDIAKKD

SEQ ID NO: 81224 - protein, 198 aa, Zea mays
  Coding DNA Sequence Number=SeqID_39445
  Gene Ontology: Mol. function=DNA binding
MVHIVEHHDFLPEDFVVEEAAASSTPRATNLPAPGAATAVHYARVARQHTPTQTSRTSRAAPGALSAATELLCHPPSSTASPGAMKQWRDDVDRLLGMTHSASTRPRPWSSRRQHEASASVRSPSVRAAPTEDLRAELNRRRAGEDAPVYMERSDDLRMELNRRRVGEDARVSIERTRERRQNVEGRNLDYDFAAVAP

SEQ ID NO: 81225 - protein, 198 aa, Zea mays
  Coding DNA Sequence Number=SeqID_39446
  Gene Ontology: Mol. function=DNA binding
MVHIVEHHDFLPEDFVVEEAAVSSTPRATNLPAPGAATAVHYARVARQHTPTQTSRTSRAAPGALSAATELLCHPPSSTASPGAMKQWRDDVDRLLGMTHSASTRPRPWSSRRQHEASASVRSPSVRAAPTEDLRAELNRRRAGEDAPVYMERSDDLRMELNRRRVGEDARVSIERTRERRQNVEGRNLDYDFAAVAP

SEQ ID NO: 81226 - protein, 396 aa, Zea mays
  Coding DNA Sequence Number=SeqID_39447
MPSPPTPQETSPSAEVGPSPSAEAAPSPSVDEPSLSSDLAAVPRNFIPINRPPFPVEQPPMHDATLVPSDSQQTSVHAARHPDPTALRICPSPISRVSSPTHPFPIWLLAAIPCSFATRLLEIRSKELSLHVLLHAGNPVTLHMEQKECLHRDPAVEIGLVLDIVGESTLIDTFFCYLGGNARLFDDYRDEYYYVLPRKFSIVARVEVKFPIEPRYRDRQHFILSDINGAKIEAMTSSYETVKHFNNLLHEKHVFKMHNVDFSISMGAHQFRHISGPMELYLTRQTVVEPYTVPFQMPPFPKHIFLSLADNAELPNRTLVDIMAIVVHLDVIHRTMWGPFRKIVVMDARWSLHAIKVWGDLLNKNALRWVLAKENCSIIIGTMFRRFRKARVPRVI

SEQ ID NO: 81227 - protein, 269 aa, Zea mays
  Coding DNA Sequence Number=SeqID_39448
MEPTVLNRERNAADRQKRMPMLFDDYRDEDYYVLPRKFSIVARVEVKFPIEPRYRDRKHFILSDINGAKIEAMTSSYETVKHFNNLLHEKHVFKMHNVDFSISMGAHQFRHISGPMELYLTRQTVVEPYTVPFQMPPFPKHIFLSLADIAELPNRTLVDIMAIVVHLDIIHRTMWGPFRKIVVMDARWSLHAIKVWGDLLNKNALRWVLAKENCSIIIGTMFRRFRRQECLESSDYTTIHFNPFNHNNHHFEPIQKALMAWNDQQTHKN

SEQ ID NO: 81228 - protein, 277 aa, Zea mays
  Coding DNA Sequence Number=SeqID_39449
MEPTILNRERNAADRQKRMPMLFDDYRDEDYYVLPRKFSIVARVEVKFPIEPCYRDRQHFILSDINGAKIEAMTSSYETVKHFNNLLHEKHVFKMHNVDFSISMGAHQFRHISGPMELYLTRQTVVEPYIVPFQMPPFPKHIFLSLADIAELPNRTLVDIMAIVVHLDIIHRTMWGPFRKIVVMDARWSLHAIKVWGDLLNKNALRWVLAKENCSIIIGTMFRRFRRQECLESSDYTTIHFNPFHHNNHHFEPIQKALMAWNDRQFAVRFLEEQRRR

SEQ ID NO: 81229 - protein, 321 aa, Zea mays
  Coding DNA Sequence Number=SeqID_39450
MGNKGTILLTSRGTVYYYIRTKRFTTLKNITRTDTIAKKIRLVLDIVDEINLIDTFFCYLGGNARLFDDYRDEDYYVLPRKFSIVARVEVKFPIEPRYRDRQHFILSDINGAKIETMTSSYETVKHFNNLLHEKHVFKMHNVDFSISMGAHQFRHISGPMELYLTRQTVVEPYTVPFQMPPFPKHIFLSLADIAELPNRTLVDIMAIVVHLDIIHRTMWGPFRKIVVMDARWSLHAIKVWGDLLNKNALRWVLAKENCSIIIGTMFRRFRRQECLESSDYTTIHFNPFHHNNHHFEPIQKALMAWNDRQFAVRFLEEQRRR

SEQ ID NO: 81230 - protein, 133 aa, Zea mays
  Coding DNA Sequence Number=SeqID_39451
  Homolog annotation: Hit_ID=Q6Z2G9; Match level="QueryCoverage=44%, HitCoverage=13%, E-value=1e-14, Identity=66%"; Hit description =Putative tubby-like protein
MLVFHKMTVQLMKIQVKYVADYGNPVMMHDKSKRVESSETTWPARRQVVACAAVCWSWREVTKEVVKTLKECGRITFPMSLKQVFTFAEAYDFEDLESMVEEIAKAFKTKKTLQKPFLTLYGIESEKAYWSSS

SEQ ID NO: 81231 - protein, 570 aa, Zea mays
  Coding DNA Sequence Number=SeqID_39452
  Homolog annotation: Hit_ID=Q5EUD0; Match level="QueryCoverage=28%, HitCoverage=31%, E-value=4e-58, Identity=75%"; Hit description =Protein disulfide isomerase
  Pfam annotation: Domain name=DUF292; Domain location=154-229; Score =6.5; E_value=7.1e-06; Accession=PF03398.5; Description=Eukaryotic protein of unknown function, DUF292
  Pfam annotation: Domain name=UBA; Domain location=401-440; Score =19.8; E_value=0.0097; Accession=PF00627.21; Description=UBATS-N domain
  Pfam module annotation: Pfam domain module=DUF292::UBA; Domain location=154-229::401-440
MGKAPRAGRSLASTKRGSTKAAEGSGEKEMSSAREEKKSNTKMRSDESRTEASNNAAHRQCPRPWRTSTRCAVTNPFHAVLFRVDTAGADCVERLQDALAAITDEDGRSPCVLHRDVAVYSKLYQLSFSDRDFLADFSNAPEWVDVTNPGPVPLAVATRFDEWVTKLLSELADAAAGQTGRECPFDLKEAISSICFAAPRCADLHELLQLKMIFATKYGKEFVVAASELMPDCEGADHAEFVKAATTDNEVHFVETSDTSVAEVLFLGITSEEKFVGLVKSEPEKFEKFDGKFEEKEILRSVELNKFPLITVFTELNSGKVYSSPIKLQVFTFAEAYGFEDLESMVEEIARAFKTKIMFIYVDTAEENLAKPFLTVYGLESEKSLLRSLLKPFDTSRISSFDLFSYIHLESMEFGRAHVIQTFFASDRNKELATNYLLEHAGSTAYYITCITLSLVEQWATEKKSIESCKLIFTQAKQYAKEYDAQGWDRDAHDQDSETLDEIVSSVRQILSIDDEKRSSSTLGKWRGVLPNEFQLDEFEIIFRGEVSKILHLYAKEFRFIMCLQDLLCA

SEQ ID NO: 81232 - protein, 123 aa, Zea mays
  Coding DNA Sequence Number=SeqID_39453
  Subcellular localization annotation: CTP_CleavageSite=35; ConfidenceScore=5.36e-01
MAKPLPPTSARSKPSDSFLERPCRRRPPPPALVARAAPATSDTDPHTDVTSPTSPTTPPELYCHRIQISYSLHSIDCNLADREYVLISEQGVDREGVQEPAPEPATEDLPTAPALEGKPQFYA

SEQ ID NO: 81233 - protein, 262 aa, Zea mays
  Coding DNA Sequence Number=SeqID_39454
MHLVLAVIQSPTWGLGPTCGDSKTPHARPDETVGRGGHVPASYGGRRGRQRDQRRVGGGYVSKCPKMARQLGFGPTCRLASSPEVGPGATVGTLKQGYPLLQYEDAILAQLPLVAWQTTLCPATWMTPGSPHGQGKCDPGLRDGSQTSLRRTGLPTAGPRDSEAEITGAKITAAWLTDGSRALAAEVVSGTCFGQTTAVGFNQSVRGAPLGDVEAMRARNREMVQWFTRSTCSGGFTNSGERDCTVPVGWSSAQAWESFTAS

SEQ ID NO: 81234 - protein, 149 aa, Zea mays
  Coding DNA Sequence Number=SeqID_39455
MVQWFTRSTCSGGFTNSGERDCTVPVWLVLGSSSGKLHGLLRKLSEGSDRAEVGGNGLVTVGALGRLWRVAGRSPELRASSGKLGAVQRGRQGRWSCMRVGFIATRGHDTGMGTGATEGAQGCVRTCSGRVLECLPTSNTWWFTSTSVQ

SEQ ID NO: 81235 - protein, 73 aa, Zea mays
  Coding DNA Sequence Number=SeqID_39456
MAYQMLLLWVPIYMHNALQLGGPCLSLTFAILAKGRDLRPWDEAVHDMKSAVWEKDEPVPKLPVEKLRLSGGK

SEQ ID NO: 81236 - protein, 87 aa, Zea mays
  Coding DNA Sequence Number=SeqID_39457
MEREWGKRKRKGRDRFLAWGGEGPAWGCMGLGQAWPSAAEDLQPWDEAIHDMKSAVREKDEPVSKLPVEKLRLSSEKWNRLKGEKVV

SEQ ID NO: 81237 - protein, 142 aa, Zea mays
  Coding DNA Sequence Number=SeqID_39458
  Subcellular localization annotation: CTP_CleavageSite=49; ConfidenceScore=5.11e-01
MGKPVPSLPMLLLSRGRVPLDSPSRWQGGRPSYSSNHFLQRTCKNYATSKAEYTNTQLDLPGYNGSSSLISCEKQTIRIEFLSLQGLTALAYNASLTPTGRRAVTALVPTITGMGDLVSGRVRGYVCGQVHSGFNNIMLKRN

SEQ ID NO: 81238 - protein, 93 aa, Zea mays
  Coding DNA Sequence Number=SeqID_39459
  Subcellular localization annotation: CTP_CleavageSite=78; ConfidenceScore=5.61e-01
MGKPVPSLLMLLLSRGRGHSVPTHTNRPHRFPGNRSGLTALAYNASLTPTGRRAVTALVPTITGMGDLVSGRVRGYVCGQVHSGFNNIMLKRN

SEQ ID NO: 81239 - protein, 87 aa, Zea mays
  Coding DNA Sequence Number=SeqID_39460
MTASKKAGPSEGFGSRLKALGLRAHYWLAPEGFDSRLRARRARDDSGYVRYMAEARDTLPRLGGCSRKPGSGQTVDSVNIPAQELGT

SEQ ID NO: 81240 - protein, 302 aa, Zea mays
  Coding DNA Sequence Number=SeqID_39461
  Homolog annotation: Hit_ID=Q6QP51; Match level="QueryCoverage=79%, HitCoverage=99%, E-value=2e-12, Identity=38%"; Hit description =Putative growth-regulating factor 1
MSTEHIGHGSASRGRRRDVRYGQKWVGSNGGGRRAEAADRRHLWQAKQATLHLRHDDRVKKAGPSEGFDSRLRALGLRALLQIRGSKAGPSEGFDSRLRALRLRTPPTGQRLALEGFDSRLRARRARDDSGIPSEGGIEPSDPIKRYRVRQITCRSRLSPLKGHDLASPKPSLGQRQPTLEDSRLARGHFAAPLTDLTGKQRRLRCSDCCATRQRLGLYLNLGRRSPPRPTPGLGLYLDLGRWSPPRPTLGLGLYLDLGRRSPPRPNPGLELNLDLGGVTASPDPGLGPNTSQGGHHYPTPS

SEQ ID NO: 81241 - protein, 87 aa, Zea mays
  Coding DNA Sequence Number=SeqID_39462
MVLVSGILSVWKGYIWLITWVNAKTWLSTTSPPQPNRILAEYVDVYSPLLYTPNPPPSPGCQHCNHCSGEDEAVEGDFQEFQDYDEF

SEQ ID NO: 81242 - protein, 87 aa, Zea mays
  Coding DNA Sequence Number=SeqID_39463
MVLVSGILSVWKGYIGLRTWVNAKTWLSTTSPLQPNRILAEYVDVYSPLLYTPNPPPSPGCQHCNHCSGEDEAVEGDFQEFQDYDEF

SEQ ID NO: 81243 - protein, 85 aa, Zea mays
  Coding DNA Sequence Number=SeqID_39464
MMGDDCKLNLNQILQYWSLERKLCQPLLITEKYVSLTTFSPYVVRETALQCLVAFSTFPHTKIYPVRRKVMTYVISYLNWLRILV

SEQ ID NO: 81244 - protein, 375 aa, Zea mays
  Coding DNA Sequence Number=SeqID_39465
MEHREAPPPQLGGRAEAGGHGRTRVEVYASTSSSRLLGFNVGWAGDGGGGQVTEAILAFGLLQHRCEDKVLEVAQRDHELVTEPAQQPRTLDLDPTGDPCCGLLSRITPHLELHRRLDLPGQGHVPCEGYKNARGLYNSIASSRRRPTSLFAMDLNHSRLDLLLTAEIYEALESRNGGSDYFGKGVLKGRIEFSDCELYLNQILHYWSLERKLCQPLLITEKPNQCASKHIPNRLKKGHEQRGHLLYESIFTVGRRSFLLVYYSTNVLLTITHSKKNLSYALAFGLSRPGCSTVILGRFSIILNDDASASYSNWCSEGFRMTDGCLKRFFVKHSLHTNHINEKIGAFVRSSLELKLGGIISSSFWKPNKHKVQRL

SEQ ID NO: 81245 - protein, 56 aa, Zea mays
  Coding DNA Sequence Number=SeqID_39466
MEWEEAGRMPPNMYCCFTGLCEAASQGGAIPTDVPGAIIRSKFSEAMGRCGSQTNL

SEQ ID NO: 81246 - protein, 125 aa, Zea mays
  Coding DNA Sequence Number=SeqID_39467
MEWEEAGRMPPNMYCCFTGLCEAASQGGAIPTDAAGGNNKVKVLGGDGKVWFAAYGPLYRLFGLCVATIVMATAQVTKHDGTVFRCTVDVEADSIAFQKRGYFDDTKLCSNFKSNDDLDLVDIQI

SEQ ID NO: 81247 - protein, 183 aa, Zea mays
  Coding DNA Sequence Number=SeqID_39468
MEKEPLDMVESSVRVIETHVDIIRSLVTDGVVDTSEPESVYTLKTTLFQIGDVCDMLEKCALSIKKYADSKRAKIIQDEALQYAEDDEAADDLEELPSPDLLTQADDPKKRLSPVVYHLPLFVGFTDGWKHLVIANDLRAEDVCELVKGPEDVEPVYYVRMCGQKIKIRPGCMCVLLFSSVGC

SEQ ID NO: 81248 - protein, 323 aa, Zea mays
  Coding DNA Sequence Number=SeqID_39469
  Subcellular localization annotation: CTP_CleavageSite=35; ConfidenceScore=5.81e-01
FSFRPELILRRQAAAPPFPSPSPSRERPPRRRRARAQPPPSPSWAPSPSATVSEAKRRRPRPRARAPPSPSPSAPPSPSPSLSPSAAEPISECATVPFPVPEPERAAVPISECATVPFPVPEPKRHRLRGQAPPSPSSSPSAAEPERRVRRRAHLRALEMEKEPLDMVESSVRVIETHVDIIRSLVTDGVVDTSEPESVYTLKTTLFQIGDVCDMLEKCALSIKKYADSKRAKIIQDEALQYAEDDEAADDLEELPSPDLLTQADILEKYFGIDDIDDPKKRLSPVVYHLPLFVGFTDGWKHLVIANDLRVEDVCELVKGPDD

SEQ ID NO: 81249 - protein, 174 aa, Zea mays
  Coding DNA Sequence Number=SeqID_39470
  Pfam annotation: Domain name=B3; Domain location=102-172; Score=3.1; E_value=0.034; Accession=PF02362.12; Description=B3 DNA binding domain
MEKEPLDMVESSVRVIETHVDIIRSLVTDGVVDTSEPESVYTLKTTLFQIGDVCDMLEKCALSIKKYADSKRAKIIQDEALQYAEDDEAADDLEELPSPDLLTQADILEKYFGIEQRRHRCDVIMLKDTKKRLWPVIHHHCSLFVGFTEGWKHLVTANDLQAGDVCELVKGPDD

SEQ ID NO: 81250 - protein, 164 aa, Zea mays
  Coding DNA Sequence Number=SeqID_39471
MEKEPLDMVESSVRVIETHVDIIRSLVTDGVVDTSEPESVYTLKTTLFQIGDVCDMLEKCALSIKKYADSKRAKIIQDEALQYAEDDEAADDLEELPSPDLLTQADILEKYFGIDDIDDPKKRLSPVVYHLPLFVGFTDGWKHLVIANDLRVEDVCELVKGPDD

SEQ ID NO: 81251 - protein, 164 aa, Zea mays; identical to SEQ ID NO: 81250
  Coding DNA Sequence Number=SeqID_39472

SEQ ID NO: 81252 - protein, 207 aa, Zea mays
  Coding DNA Sequence Number=SeqID_39473
MEKEPLDMVESSVRVIETHVDIICSLMTDGVVDTSEPESVYTLKTTLFQIGDVCDMLEKCALSIKKYADSKRAKIIQDEALQYAEDDEAADDLEELPSPDLLTQADILEKYFGIEDNVFCMNLLESVKSMNYLRVLLGSNGIGGMPESADPKKRLSPVVYHLPLFVGFTDGWKHLVIANDLRVEDVCVLVKGPDDGEPVYYVRMTNL

SEQ ID NO: 81253 - protein, 359 aa, Zea mays
  Coding DNA Sequence Number=SeqID_39474
MEKEPLDMVESSVRVIETHVDIIRSLVTDGVVDTSEPESVYTLKTTLFQIGDVCDMLEKCALSIKKYADSKRAKIIQDEALQYAEDDEAADDLEELPSPDLLTQADILEKYFGIEDNVFCMNLLESVKSMNYLRVLLGSNGIGGMPESADPKKRLSPVVYHLPLFVGFTDGWKHLVIANDLRVEDVCELVKGPDDADIREEKRTDETIISPLAKELDEGDVDKIVPQNVDVNIKKEPKVGTNVEGPTISKKIHKRIATDDVKKPSESVARYLHKLQRVMTNQSKAVSASHGVGTRPAQIDNFEVWEEDGMIHTRESLRLKTNISVYKKEDVPPKFVNGRPFLTTMQLSKLSTPEIRMHE

SEQ ID NO: 81254 - protein, 53 aa, Zea mays
  Coding DNA Sequence Number=SeqID_39475
MPLCSPPHNGLMLHSSILETPFYDEWKNNFPDQETEEDQPIIGHLSSMVWYKL

SEQ ID NO: 81255 - protein, 119 aa, Zea mays
  Coding DNA Sequence Number=SeqID_39476
MACSFALVARAVSCVVIVQCRVCPRVVRTLSCCFVLFEFYKVEEPEHLFGEGNDTLPGHLGSGQWGLALPGQKGNHDSWVKDGWFTGGDKDDGYDYGNGKEEGVEANLQEFQDFDEFED

SEQ ID NO: 81256 - protein, 58 aa, Zea mays
  Coding DNA Sequence Number=SeqID_39477
DTLPGHLGSGQWGLALPGQKGNHDSWVKDGWFTGGDKDDGYDYGNGKEEGVEADLQEF

SEQ ID NO: 81257 - protein, 188 aa, Zea mays
  Coding DNA Sequence Number=SeqID_39478
MVRERRTQTNTMSKNTRDTRFIPRFGHTTKVPYFLVEAPTKSRVSFNPNPPFANHRGQAHTIIFAQTSGVWEVYIKVPPKAGGRWGKLAKNRLNRFVNRLNRFPPGRTRFTDLLSRRVNRTQNRLSRAQIRLNRFSQNLHTTFSDRTDWQTGSDRAEQCRNRLNRFKVRLNRFLNCCTDFEKTDVKLG

SEQ ID NO: 81258 - protein, 166 aa, Zea mays
  Coding DNA Sequence Number=SeqID_39479
MVRERRTQTNTMSKNTKDTRFIPRFGHTTKVPYFLVEAPTKSRVSFNPNPPFANHRGQAHTIIFAQTSGVWEVYIKVPTKAGGRWGKLAKNRLNRFVNRLNRFPPGRTRFTDLLSRRVNRTQNRLSRAQIRLNRFSQNLHTTFSDRTDWQTGSDRAEQCRNRLNRF

SEQ ID NO: 81259 - protein, 336 aa, Zea mays
  Coding DNA Sequence Number=SeqID_39480
MDPGTHMMVRTLQTTRINTSYAPQPRQVPVYPVVVEEAPADLPPIQVENVINLEDSSEEQLPTPTPLAESLAFAAGSATSAPAFQAPAPGGDDPDDSGDGYDDDDDGEDEHVHEEADYAQQDPFMGIGPVVEHYTSMFETGRFPNLLQAVLYELGAYARPLYETRRVSEPPRACYYITRIHVRVMDAGDRGLRTLSAHESLIPLSTYAASVSDAARRTLWSLSHTYRQQLQNTRFRHLPQRLRGENQTNIVPGEPGEDRLNTLAGVVAGLNTDLDSATLDLYSVHLELENAHARISALEAQLQGLDPPEAQVPAVALSPPRKRMRYGEPGSVTRLL

SEQ ID NO: 81260 - protein, 336 aa, Zea mays
  Coding DNA Sequence Number=SeqID_39481
MDPGTHMMVRTLQTTRINTSYAPQPRQVPVYPVVVEEAPADLPPIQVENVINLEDSSEEQLPTPTPLAESLAFAAGSATSAPAFQAPAPGGDDPDDSGDGYDDDDDGEDEHVHEEADYAQQDPFMGIGPVVEHYTSMFETGRFPNLLQAVLYELGAYARPLYETRRVSEPPRACYYITRIHVRVMDAGDRGLRTLSTHESLIPLSTYAASVSDAARRTLWSLSHTYRQQLQNTRFRHLPQRLRGENQTNIVPGEPGEDRLNTLAGVVAGLNTDLDSATLDLYSVHLELENAHARISALEAQLQGLDPPEAQVPAVALSPPRKRMRYGEPGSVTRLL

SEQ ID NO: 81261 - protein, 173 aa, Zea mays
  Coding DNA Sequence Number=SeqID_39482
  Gene Ontology: Mol. function=peptidase activity
  Homolog annotation: Hit_ID=Q67VK9; Match level="QueryCoverage=72%, HitCoverage=40%, E-value=3e-39, Identity=51%"; Hit description=Cgi67 serine protease-like
PSEANTFADIEATYKCLVDVYGTREEDIVLYGQSVGSGPTLNLAVRLDRNIDKITHVKCPVLVIHGIKDDVVDCSHWKWLYKLCQHKYEPPWIEGGDHGNLKKFPVYIRHLKKFLLTIKKLPSKKDVVTDHEPWVTENITHPSGGAIFEAPTSWRLESSKKSMIHEVQAKHGP

SEQ ID NO: 81262 - protein, 249 aa, Zea mays
  Coding DNA Sequence Number=SeqID_39483
  Gene Ontology: Mol. function=peptidase activity
  Homolog annotation: Hit_ID=Q67VK9; Match level="QueryCoverage=55%, HitCoverage=43%, E-value=1e-46, Identity=55%"; Hit description=Cgi67 serine protease-like
  Subcellular localization annotation: CTP_CleavageSite=25; ConfidenceScore=5.06e-01
MAQSTVGSLRVVGAPDMSGAHRTVRCTLLAVGSAHVSRADCAARPLARPDRWLTGQSGAHRTVRYDYSGYGQSSGKPSEANTFADIEATYKCLVDVYGTREEDIVLYGQSVGSGPTLNLAVRLDRNIDKITHVKCPVLVIHGIKDDVVDCSHWKWLYKLCQHKYEPPWIEGGDHGNLKKFPVYIRHLKKFLLTIKKLPSKKDVVTDHEPWVTENITHPSGGAIFEAPTSWRLESSKKSMIHEVQAKHGP

SEQ ID NO: 81263 - protein, 81 aa, Zea mays
  Coding DNA Sequence Number=SeqID_39484
  Subcellular localization annotation: CTP_CleavageSite=52; ConfidenceScore=5.50e-01
MNPGRHRVNPSLSGHGCSTGQHMKLLDSSQTPKRQSWTGTMLTASLLSTLSSAQALAAEKCVAGGFDRGGPPVFDRTDRFE

SEQ ID NO: 81264 - protein, 203 aa, Zea mays
  Coding DNA Sequence Number=SeqID_39485
MGRLLTVIPRVPRAIHGERRIPAFDDESRPPQGQSFPIRPRVFHRPAHEASGLIADPQTSVVDEDDADGVWRILRSSGAPMNDCREVARPRAAQAMNRQFPNQRTFPTPLPKVLLAVAAELRRWLVQRGFLALEPSAVGDFTGIAASRLWVNRAVPRLPFILPVPGQRRGTELSHVPGHGGGILAFRCDVGERTDARARAPEG

SEQ ID NO: 81265 - protein, 211 aa, Zea mays
  Coding DNA Sequence Number=SeqID_39486
MGRLLTVIPRVPRAIHGERRIPAFDDESRPPQGQSFPIRPRVFHRPAHEASGLIADPQTSVVDEDDADGVWRILRSSGAPMNDCREVARPRAAQAMNRQFPNQRTFPTPLPKVLLAVAAELRRWLVQRGFLALEPSAVGDFTGIAASRLWVNRAANALTRGPELQRAERSAAERKGAVQWDPRPEKALKMTSASLDSVFIKVSIKVFFITL

SEQ ID NO: 81266 - protein, 210 aa, Zea mays
  Coding DNA Sequence Number=SeqID_39487
MGRLLTVIPRVPRAIHGERRIPAFDDESRPPQGQSFPIRPRVFHRPAHEASGLIADPQTSVVDGDDADGVWRILRSSGAPMNDCREVARPRAAQAMNRQFPNQRTFPTPLPKVLLAVAVELRRRLVQRGFLALEPSAVGDFTGIAASRLWVNRAANALTRGPELQRAERSAAERKGAVQWDPRPEKALHPETFLQLRYMKYIMNIRKMIR

SEQ ID NO: 81267 - protein, 147 aa, Zea mays
  Coding DNA Sequence Number=SeqID_39488
MEQRITRPMLAGGRVESGDRGLASPAKQTPIPRSGSFTEVCSVFSKGCTGLGRVRLAGLRWQGDRGGRGHAGHGQTPVVWGSGEVKRVRRGTVKVPGGFIGRWRGAMAPAGLWRDAGHAGGAHGHALASSERVEHVALCFCPCSSLC

SEQ ID NO: 81268 - protein, 133 aa, Zea mays
  Coding DNA Sequence Number=SeqID_39489
MVEAQGRDGAMVAELRLRKNHSSECGPAEPGREGAHRRMSREADGKAKLTMALDGARAQRRPQNRRWTSAGGGGGSLFVWAEREREQESWAEGANGRGEVGEQGAGFKRGAGARSWPENARTWARPRRGDRGR

SEQ ID NO: 81269 - protein, 89 aa, Zea mays
  Coding DNA Sequence Number=SeqID_39490
  Homolog annotation: Hit_ID=Q5ZDJ3; Match level="QueryCoverage=38%, HitCoverage=3%, E-value=2e-12, Identity=94%"; Hit description =Acetyltransferase 1-like
SSKAVEVLEAYEGTLEDDYPPENERYEHNEMLLYKYDRHFAAKYELGKEVGRGHFGHTCSHAVTPGFRRQTECEPCTCQDQLFTYTAVT

SEQ ID NO: 81270 - protein, 662 aa, Zea mays
  Coding DNA Sequence Number=SeqID_39491
  Gene Ontology: Mol. function=transferase activity; Cellular component= thylakoid; Biological process=photosynthesis
  Homolog annotation: Hit_ID=Q5ZDJ3; Match level="QueryCoverage=99%, HitCoverage=76%, E-value=0.0, Identity=81%"; Hit description =Acetyltransferase 1-like
  Pfam annotation: Domain name=TPR_2; Domain location=173-206; Score =12.4; E_value=1.2; Accession=PF07719.7; Description=Tetratricopeptide repeat
  Pfam annotation: Domain name=TPR_2; Domain location=330-363; Score =12.7; E_value=1.1; Accession=PF07719.7; Description=Tetratricopeptide repeat
  Pfam annotation: Domain name=TPR_2; Domain location=364-397; Score =11.8; E_value=1.4; Accession=PF07719.7; Description=Tetratricopeptide repeat
  Pfam annotation: Domain name=TPR_2; Domain location=43-76; Score=1.6; E_value=21; Accession=PF07719.7; Description=Tetratricopeptide repeat
  Pfam annotation: Domain name=TPR_2; Domain location=440-473; Score =3.5; E_value=13; Accession=PF07719.7; Description=Tetratricopeptide repeat
  Pfam module annotation: Pfam domain module=TPR_2::TPR_2::TPR_2::TPR _2::TPR_2; Domain location=173-206::330-363::364-397::43-76::440-473
MGSSLPPKEANLFKVIVKSYETKQYKKGLKAADSILKKFPEHGETLSMKGLTLNCMDRKSEAYELVRRGLKAQMRDLSGFVETRQQLLSLKPNHRMNWIGFAVAHHLNSNSSKAVEVLEAYEGTLEDDYPPENERYEHNEMLLYKISLFEECGMLDRALEEMQKKESKIVDKLSFKEQMASVLFKLGRFDESESIYRSLLFMNPDNYKYFIAVQKCLGLYSDNGQYSAADVERLSALYNSLKEKYAWSSAVKRIPLDFLEGEKFQEAADNYVRPLLTKGVPSLFSDLSPLYEHPGKANILEQLFLKLEDSIRDSGCFPGCPQKEPPSTLLWTLFLISQHYDRRGQYDIALNKIDEAISHTPTVIDLYSVKGKILQHAGNFTAAAALADEARSMDLADRYLNSECVMQMLQADQVGLAEKTAVLFTKDGDQHNNLHDMQCMWYELASGESYYRQGDLGRALKNFLAVEKHYADMTEDQFDFHSYCLRKMTLRAYVSMLKFQDRLHAHEYFHKAAAGAIRIVGDAAGTNCRCYMKLHDSPTKSSKEENDEISKLPPAQRKKLRQKQKKAEARAKREAEEKQEDETASSNSSKSGKKQHARPVDLDPHGEKLIQIEDPLAEATKYLKLLQNNSSDSLETHILSFELSMRKQKVLLAFQAVAYISM

SEQ ID NO: 81271 - protein, 409 aa, Zea mays
  Coding DNA Sequence Number=SeqID_39492
MGVFGVEGVRPLWRGCMPTAWLSALSPAGLGESGGMLVTAGQLHAPHAAVWLLLPWASLHDAWDPAPVSQGEDLGACWRRLSPRWLRMQVGRVAFKRRVIPLKGDHVFALPYASRLSTFRAPGWGTPAILSSCRRRNATSWELVPFSHRSTSRIFIKRPGRIPSLVVTQDGDHQPLDGEKQAGLRPPPLPQLQGCSSSLLGQRARRAGALPPALDATFNPLPRFHGEDGSEDLLVRFGAARVRRCGVGGEADAAVGADVVAAGGSLPTVEAISAAYGPASGSLALMSDSPVGYLNRFTKRGSPRAKVTSESGDPPTASPSEARSDLAEGVVDARGSVTDVVEKAQKIVSAEELSSVKTCSVRGITYPSASYLSQKVMSEPKHQVAHLEVSAPNPSGVLASQGLLVPRRV

SEQ ID NO: 81272 - protein, 100 aa, Zea mays
  Coding DNA Sequence Number=SeqID_39493
MATIAQQPRHRGEGACCPAHARSSRGCRRRSVDTHLMKMLPTLILTDLKELGDADRTGARGKGSEKRGHNTPTLITKKQISHNTKTNNTSIQQQTSRCYT

SEQ ID NO: 81273 - protein, 83 aa, Zea mays
  Coding DNA Sequence Number=SeqID_39494
MKRDSRSYSREVIAFTLNRSVDTHLMKMLPTLILTDLKGLEDADRTGARGKGSEKRLSKDEEKNKTCRIGTRAQLRMELKQGL

SEQ ID NO: 81274 - protein, 233 aa, Zea mays
  Coding DNA Sequence Number=SeqID_39495
MQACQAPGARPRTRHARALTVAFADLQDPGARRERENSGGGSACRRLHYAARLRPGSAEHRAPARGCREGPSRRGERMGKGREERGLTGNRHVQGRQLLRDLDLGKETRGYVTAGWLYKREHERRLPNSPSTVLRPSERGDCEYDEAANPLNRSVDTHLMKMLPTLILTDLKELEDADRTGARGKGSEKKVGIGEASWKDLDIRKVHDKHQSNDRRMTRVKVITDKHVIKDVF

SEQ ID NO: 81275 - protein, 208 aa, Zea mays
  Coding DNA Sequence Number=SeqID_39496
  Subcellular localization annotation: CTP_CleavageSite=72; ConfidenceScore=5.14e-01
MKFPNRHGYCPWSLRAGGGASAGGYGRSTAATTAGQAATLGKNGATNRGTGTRLGIGLNPSKGDGAWERWVPSAIGEQDTIGRSRRECRAQGAEESAARREPDTAGLNLSCAEGAPSLVDAEDDGAEGAAWEQARAGLRTGRWGGRGRGEPPRRAPWTRRRAGLPGGSVEGERGWGREERGEDSPGTAMCRDDSFCVSWIWGRRLEVM

SEQ ID NO: 81276 - protein, 197 aa, Zea mays
  Coding DNA Sequence Number=SeqID_39497
MQFEQGIAATDRTGGNSPSVAPLSPPPAAAAVGARVAEEEEAQGGEQREELRREGLVEEAQDGAAHDGVAQLQVEQHVVERVRRQVVDRRRGLRFRGRGGVRAGGHGGFRVGLGGERTGGVEKMTRPGVRGPDVSEKKADGLGVMVGVGRSKPPQRETASGGGDSWGSESMIIGRGRSFPREALGVYGEKASRMETK

SEQ ID NO: 81277 - protein, 469 aa, Zea mays
  Coding DNA Sequence Number=SeqID_39498
  Homolog annotation: Hit_ID=Q6ZGV8; Match level="QueryCoverage=40%, HitCoverage=14%, E-value=4e-78, Identity=74%"; Hit description =Eukaryotic translation initiation factor 3 subunit (EIF-3)-like
  Subcellular localization annotation: CTP_CleavageSite=17; ConfidenceScore=5.15e-01
LLALLPTLRLLLLHHPRPNGGGCLHAFNPARRTWLRLPFAQFLPYQSFSPIASSTSLLYLWVETSSSTSPLALPPSTSSASSASPVHPPKSLAVCNPFSDTYRLLPQLGSAWACHDTVLTGPAGTVLIRTELAALSYTPSRSAKWMKHPLSLPSKPRSPILASDAVFALCDVGTPWRSQWKLFSCPLAILTGGCAPVERAVWGDVFEVLKRPRLLARAGGRRVLMIGGLRSSFAMAGTRRGAGGRRMRRAEETRELRTINKWGEMMYEKIKKLDKELARYVHNNIFFSFAVDSDYEDISKDHKPDCQNGSSRSTKVSSPDVITKPDANHGKSAEVVDSKSEEAQLTDREQATYASTNNDLKGTKAYQEADVSGLHNLAMAIVDYRGHRVVAQSIIPGILQGDKSDSLLYGSVDNGKKISWNETFHSKVVEAAKQLHLKEHVVLDGSGNPVKLAATVECKGIVGSDDRKR

SEQ ID NO: 81278 - protein, 214 aa, Zea mays
  Coding DNA Sequence Number=SeqID_39499
MKEARNHYHTRGSSRGGGGTATEHDLVLQWGNRKRLCCVKVQRRDEAAAIAAAEKAAISQRRAAAAAAQHHPTGHTHQHHCVLRLIQVNNFNVHKFSYNYSKSIVRNTVDYSRQEKLFGKTPMRGLSGPLRRTVRDTRVTLGQEHCKNTRLHYGASDGEANTVRDQARTVRPQARTVRPVKTQKNPKPLLLTVAISAVDMQGRTVRVRQERTNG

SEQ ID NO: 81279 - protein, 77 aa, Zea mays
  Coding DNA Sequence Number=SeqID_39500
  Subcellular localization annotation: CTP_CleavageSite=59; ConfidenceScore=5.12e-01
MAADLLCPLAVPPLLPQASAFPDHISMTEQQLYSPPSFFFPCAAARSPCSQPWRPTSLRSVMRIGRIAFEIGEQKVM

SEQ ID NO: 81280 - protein, 214 aa, Zea mays
  Coding DNA Sequence Number=SeqID_39501
  Subcellular localization annotation: CTP_CleavageSite=28; ConfidenceScore=5.18e-01
MADGLRSAAAMDELLFSPAVPLRAGSTKASAPFSNGVLAAGCAETSPWRPLLLPPAARQQAAIPMAELTSLPRALSGSFPKSDWSLPPPWPAPSNSSSRVFVLPLLSAACSKQGARVSSMAANLLCPLAVPPLLPQASTFPDHISMTEQQLCSPPSFFFPCAAARSPCSQPWRPTSLRSGADPKQRPRITSALRASPDLRSPNIDAVHLEKKKK

SEQ ID NO: 81281 - protein, 212 aa, Zea mays
  Coding DNA Sequence Number=SeqID_39502
  Gene Ontology: Mol. function=helicase activity
  Homolog annotation: Hit_ID=Q5NA16; Match level="QueryCoverage=56%, HitCoverage=25%, E-value=6e-16, Identity=37%"; Hit description =Helicase-like protein
MAHRTVRYPSCSRCHKSSSQTSTGYHCTSCGCTDINFRYKLSFIATDGTCEAEFFCFDSIARKIVGKPCDNLVTAVTTSQGPPAALVAIVCLKFTLAVTINMSAYSVTNRVFSILSILTNHGRQAFIPSNMPSHPQQELDTQDEIPSLPTTQDSPATSMAKLSTCSNERNEGDAQRISELNNEELSSPPKRIKHGHSSKGIPDLTDPKKKSS

SEQ ID NO: 81282 - protein, 205 aa, Zea mays
  Coding DNA Sequence Number=SeqID_39503
  Gene Ontology: Mol. function=helicase activity
  Homolog annotation: Hit_ID=Q5NA16; Match level="QueryCoverage=58%, HitCoverage=25%, E-value=6e-16, Identity=37%"; Hit description =Helicase-like protein
YPSCSRCHKSSSQTSTGYHCTSCGCTDINFRYKLSFIATDGTCEAEFFCFDSIARKIVGKPCDNLVTAVTTSQGPPAALVAIVCLKFTLAVTINMSAYSVTNRVFSILSILTNHGRQAFIPSNMPSHPQQELDTQDEIPSLPTTQDSPATSMAKLSTCSNERNEGDAQRISELNNEELSSPPKRIKHGHSSKGIPDLTDPKKKSS

SEQ ID NO: 81283 - protein, 76 aa, Zea mays
  Coding DNA Sequence Number=SeqID_39504
MAQHLLLEVYAHRDLANRLHTIARMISGTSPLLTSRIYEGKLLIEGITQCAAWHGRTVRQQTQQARRLLDDLDAAC

SEQ ID NO: 81284 - protein, 192 aa, Zea mays
  Coding DNA Sequence Number=SeqID_39505
MPLSTTVMGQPAVRIGTTVGVVISGLAVIAATGAWKQRSNHQTDSGPTCRLAPSPKAGPGATVGTLNQGYPLLQHKGIAPMRRLLAAWRTASNSTGWAGQRAPRGEERHHASVRPDPHRGSPGPYIHIVSEPQGGVKVIQPAARLLGLLANSAPVPSSTLCYPFYKKLPQHAEDTQISDDRTQGDCPGSKYL

SEQ ID NO: 81285 - protein, 151 aa, Zea mays
  Coding DNA Sequence Number=SeqID_39506
MASANVGGTGGGLRVASLPRELPITFGSLAVGCRRPFINQLHRGRRPEKVQFTTKCFSRYSRRSGFHPDRIHSQGFSDIIGQHPGAHLPDAGMMAKKGKALQLIVESLVLGIRCPKPTPAQWSEDYFDLYGVDPSMWIQVSVQHFSSPAAH

SEQ ID NO: 81286 - protein, 129 aa, Zea mays
  Coding DNA Sequence Number=SeqID_39507
  Subcellular localization annotation: CTP_CleavageSite=35; ConfidenceScore=5.47e-01
MASANVGASLSGVGDHSSTSFIEGGGLKRTSSPPSASPATPEGPASIPTGSAEMGLALIPDVTEPSKSLGPPTVVLVPQTLDNPACAPDHLISSVSEFLTFPRAFHPSRKHYNSSEIRKCGSSYNNLLY

SEQ ID NO: 81287 - protein, 252 aa, Zea mays
  Coding DNA Sequence Number=SeqID_39508
  Homolog annotation: Hit_ID=Q5NAR7; Match level="QueryCoverage=22%, HitCoverage=3%, E-value=6e-15, Identity=77%"; Hit description =Putative FUSED serine/threonine kinase
MSDDLVVPVHFEVGQELCFRLLDHPLLVLLKLGAAPSARQEISEAIPLNRPFEGRFDKLRYVFPSGVAKKYVDAFSERQTLNKNRGGALCTGADGPRAGAGTVRGPGCEARWVLSAQGAGLSAAWGRTVRGPGARLGLLPDGRTIRALGPDGPHGTGKRCLGLGFLAVLTSASRISNPNLIGDEGSPASASCFSVMNNFHVYEDIGRGKHSVNLLTSSPDAKTVYKGRKKKTIEYFAVKSVDKSQRSKVLNE

SEQ ID NO: 81288 - protein, 139 aa, Zea mays
  Coding DNA Sequence Number=SeqID_39509
  Gene Ontology: Mol. function=protein kinase activity; Biological process=protein amino acid phosphorylation
  Homolog annotation: Hit_ID=Q5NAR7; Match level="QueryCoverage=52%, HitCoverage=5%, E-value=3e-35, Identity=94%"; Hit description =Putative FUSED serine/threonine kinase
MVSVPLFPLSRPGSAGIGAARAPAGDLCLSVSFSLVRCVIWCCWCLCGAKTVYKGRKKKTIEYFAVKSVDKSQRSKVLNEVRMLHSLDHANVLKFYSWYETSAHFWLVLEYCVGGDLKGLLEQNNSNQGEMWKFRAMKL

SEQ ID NO: 81289 - protein, 384 aa, Zea mays
  Coding DNA Sequence Number=SeqID_39510
MKRLLETTHLELNGKLFINTQQAPTWRANCRRFDPGEWVRLQWGLQAFARERECEPVRQPVLPRDHPSRMRALDLPFIDARRGSRCTMGRPPSEAEAEAEPWGRARRRPPSEVEAGAEPRGQARRSFLLRLRLDLDVVSLTLAGGTVVEAGQAALFFCQVILALNAPAIWSVGEAIWPRLLHCEACPSWASGESRVLMSIPMPTGFIGADPYKIRAGVASGRDLEIGELARGSNQSMDVTERLALEELFPNPSSLEETAGFAYLNLQEACPPFSDPMSRSPSQAVADDGQSTAEMVCESSDAERFAVCCVTYVGMELRQRSVSGGRRVVAASADDGANSFGSSMRESAAAAVVVADVAAMAWWPEANGGTKKKLEKESSLDYNC

SEQ ID NO: 81290 - protein, 157 aa, Zea mays
  Coding DNA Sequence Number=SeqID_39511
MVCESSDAERFAVCCVTYVGMELRQRSVSGGRRVVAASADDGANSFGSSMRESAAAAVVVADWRPWRGGLRQMAARRRSWRRSRRWTTICSCADKAIYFQCAIENTWATVDVFLKAAGYIDCAIRHVLAKMPLELRRQLPVDLAEGNLKALSLQALG

SEQ ID NO: 81291 - protein, 462 aa, Zea mays
  Coding DNA Sequence Number=SeqID_39512
  Gene Ontology: Mol. function=nucleotide binding
  Homolog annotation: Hit_ID=Q949Q9; Match level="QueryCoverage=83%, HitCoverage=72%, E-value=1e-142, Identity=62%"; Hit description =Putative growth regulator protein
  Pfam annotation: Domain name=DUF246; Domain location=55-386; Score =477.5; E_value=1.6e-140; Accession=PF03138.5; Description=Plant protein family
  Subcellular localization annotation: CTP_CleavageSite=12; ConfidenceScore=5.06e-01
MRDDATLASSLSASASWRRTMLMTSHYQNSGDPWMPCVNGRLTRSELPPSNGYLMIEANGGLNQQRLSVCDAVAVASLLNATLVIPTFHLNSVWRDPSKFGDIFDEDHFIETLKEHVRVVKKLPEDVLLRFNHNISSIPNMRTKAYSSPNHYVQNVLPKLLELGAVRIAPFSNRLAQSVPLNIQALRCLVNYHALRFAEPIRILSDELVGRMTKKSLLTGGKYVSVHLRFEEPFHAVHMMVAGGKKLKWTMLVKGAGELASQVGMMLRGMGFDNTTSLYVASGKIYNSEKYMAPLRQMFPLLTTKDSLALPEELAQFKGHSSQLAALDYTVCVHSEVFVTTQGGNFPHFLMGHRRYMFGGNAKTIKPDKRKLVLSFDDPNIRWDQFKQNMQEILQHSDMRSIALRKPNDSVYTFPMPDCMWPMAAATATPPWASLGPDTTPLLDKQLALELQHDGCSKTEST

SEQ ID NO: 81292 - protein, 232 aa, Zea mays
  Coding DNA Sequence Number=SeqID_39513
  Pfam annotation: Domain name=IQ; Domain location=48-68; Score=26.5; E_ value=9.4e-05; Accession=PF00612.17; Description=IQ calmodulin -binding motif
MGDLWANIRADLTKMQATLQKVEQGLLQIKAAVQHEQHQLALSARLQTSATVGIQAAARGFLARRRVREMRRQMLEAALVTVDLDTRGHDLALLDGHQQRHRAAISKCEHGTCPAHDELQLYGSSAREGTPLVIGKGALFCATTFRYRPPRGRLRWLLLRPTPGARPCASLSSRWRPWDLGGCTRASPMRRGCPPYLMGCLVLGQVDSVFEHPPLLQLEDELLVQEGCSVRA

SEQ ID NO: 81293 - protein, 99 aa, Zea mays
  Coding DNA Sequence Number=SeqID_39514
  Subcellular localization annotation: CTP_CleavageSite=32; ConfidenceScore=5.02e-01
MGPARQFGRASDPSQRRRRRWGWASAPTRGCSVRARWAGVCDGPQARGTLGKRGGGPLGRKGAWAAREKQAARRGAGRVGRWGAALGRPTRTEGRRPDW

SEQ ID NO: 81294 - protein, 97 aa, Zea mays
  Coding DNA Sequence Number=SeqID_39515
MVSHSGYGGYKCGHCTTAVGVSEALYAKAVLLRMIGCWCDLAFVPATGTDGRVGYCFRRRGPGGVAWPDFAMLLGFSPLVISAALKFMVIISETPIT

SEQ ID NO: 81295 - protein, 147 aa, Zea mays
  Coding DNA Sequence Number=SeqID_39516
MPRNMVNRGYKCGHCTTAVGVSEALYAKAVLLRMIGCWCDLAFIPATGIEGPIRNALPRVRLILSRIFTTFLVLVLNDLMRLPLFSPGSARQPILVSWSVHPHIKSHASLLPDNLRGDHDKFEESKILMCCSFANNLCFNSGHILTF

SEQ ID NO: 81296 - protein, 53 aa, Zea mays
  Coding DNA Sequence Number=SeqID_39517
MGIGCLRDENLNKDYGVVPYLLDLFDSVTWPSSLPPGQTVEWVIASAGEDQEE

SEQ ID NO: 81297 - protein, 125 aa, Zea mays
  Coding DNA Sequence Number=SeqID_39518
MVSHSGYGGYKCGHCTTAVGVSEALYAKATQLVFLANQTPQPNSCMSRGRGVDSSHRVLLRMIGCWCDLAFVPATGTDGRVGYCFRRRGPGGVAWPGFAMLLGFSPLVISAALKFMVIISETPIM

SEQ ID NO: 81298 - protein, 436 aa, Zea mays
  Coding DNA Sequence Number=SeqID_39519
  Homolog annotation: Hit_ID=O22402; Match level="QueryCoverage=22%, HitCoverage=19%, E-value=5e-38, Identity=80%"; Hit description=GDP dissociation inhibitor
  Pfam annotation: Domain name=GDI; Domain location=61-353; Score= -125.9; E_value=4.9e-10; Accession=PF00996.9; Description=GDP dissociation inhibitor
  Pfam annotation: Domain name=TFIIA_gamma_C; Domain location=90-130; Score=19.0; E_value=8.3e-05; Accession=PF02751.5; Description =Transcription initiation factor IIA, gamma subunit, beta-barrel domain
  Pfam module annotation: Pfam domain module=GDI::TFIIA_gamma_C; Domain location=61-353::90-130
MEALELRYRMKRILVIWLVPPSRWPLRVEVVDWTTRRLEGFGERWMVGRCNQELEWAGDDDEGRSLLFFVNLYYFLRLHVDVHRSNILASKENGHLHTNRDCDNVWTFILTDATFKSAEIQETLSKIYNKNYTFEYSNNKESKTLKLWCLAVRLLKEMWKRKYGLSDDTVDFVGHALALHRDDRYLDEPALDTVKRMKLYLPIVCLYLYADSLARFQGGSPYIYPLYGLGELPQGFARLSVVYGGTYMLNKPDCKIFFFTSFHINLNNKKMLSFFSCVASFSQLLYVSSVGVHTAAFYHPQPPHAATRSRPVGNRPHPRLPSIASAPSTLLPSEESLPSMAPLLQFPQRSALPPLPTRSTLPPLPPRCCLPRNPSIHGVVAASAPQSTPLPPRSPSTDGTHLPSTKLLFLHSTDGTHLSDPVLITILPLARRPISL

SEQ ID NO: 81299 - protein, 244 aa, Zea mays
  Coding DNA Sequence Number=SeqID_39520
MEAIGNTMPALGILADDDVVEYTGDEVLAQRLPRGAVEGGADVATTVSEHVDRGRGGQVGGECHTALHDVRPTATRIAVRKMGEVAPLIPATWRRTMSRKAAGAVEADRPAEDVSEEKTLKITIALNQEAEVVAIASKEEKGLQDEPKGEKVYALRVLDELSRLRMADHDVDRTPEMTICFRNLNFVFDGEEEMSGPQKPGPFCLGVSALPRGPTHGPCIVHTPRATICFGGLDFIIGEEGEMP

SEQ ID NO: 81300 - protein, 164 aa, Zea mays
  Coding DNA Sequence Number=SeqID_39521
MGEVAPLIPATRRRTMSRKAAVAVEADRPAEDVSEEKTLKITIALNQEAEAVAIASKEEKGLQDEPKGEKEDKKTLVERYIVKETQITITTMNCSISRSEADIGVKRKKPNESLYEKKPEEPTLVLTSLVIEILQPGANPIVTNLNMSKMHLLLRLGTTQKANR

SEQ ID NO: 81301 - protein, 127 aa, Zea mays
  Coding DNA Sequence Number=SeqID_39522
MRLSQNALNTKQPAKVSKIGVEALWVRYLSQEYVPMSTTVGRWGTTTSRRVEGLAVFVRAAHGFLGGATGLRVAASLHGRCGQWCGEKKSLNEWAERRGEGKRGAPRDFMNVGGSSSVVNGVGYQSE

SEQ ID NO: 81302 - protein, 110 aa, Zea mays
  Coding DNA Sequence Number=SeqID_39523
MRLSQNALNTKQLAKVSKFGVEALWVRYLSQEYIPMSTVQGVVGLRVAASLHGRREQWCGKKNSLSEWPERRGEVQLRFIGQEGERGAPRDFMNVGGSSSVVNGVGYQRE

SEQ ID NO: 81303 - protein, 108 aa, Zea mays
  Coding DNA Sequence Number=SeqID_39524
MVLNRLRRRHYTETLFSCKSPARSQLNHFNPKTWYLAEQASEKDFKNIKGGGKCTGTCLRSQISKLARNRKENNDRLGPKSAQSATTAETHPHARARGDFQKDPRQSG

SEQ ID NO: 81304 - protein, 186 aa, Zea mays
  Coding DNA Sequence Number=SeqID_39525
MRFYKTRSRPLRHKCEAKLQISSEAKQKKTDLWADYLKINPKIGGLWGTDIPRVHWKGKRPHERPKGPVNRKCPSCIWHEPFCYSRRHHPTPKNTSRGNPGCAVGPKTPTASPPLESQALMGSTSGKDVPLPGTKLWVEMIKLRPGGCLAREESLGVVSPSESIKDRLDVGLLTEDPLTGHMPRHG

SEQ ID NO: 81305 - protein, 171 aa, Zea mays
  Coding DNA Sequence Number=SeqID_39526
MACTNRFKERSLGVVSPSESIKDRVDVGLLTEDPLTGHMPRHGIHFSKHFCKTESLIIEKPYLDSLNQHTLESLFFSRVRKQQIFVAFAPRWFPMKKNKSEAAGGHGPPLELYKNYREEFLPPLMGETFLERTTVGGPNYLGGSVTAGIRAKPFFADIMRHLQKDFLKRLI

SEQ ID NO: 81306 - protein, 199 aa, Zea mays
  Coding DNA Sequence Number=SeqID_39527
MARVACTLREAGRWCICALGLSEVRWTKTTVGGPNILGGSVTAGIRVKPFSADIMRHLQKDFLKTYLKKFHSYPLYLKNLYERPDRKGAMYRRHIAIPYMKKFMYCIHNCTPAYLQILSGQKPDLLTKREKLLVMSSKTRSQDAAGTSSGRESTPNPPPVPPTLAKAIAALVNATADNTRFLRKMAGQQFQQQGGRGYP

SEQ ID NO: 81307 - protein, 118 aa, Zea mays
  Coding DNA Sequence Number=SeqID_39528
  Homolog annotation: Hit_ID=Q5QMR4; Match level="QueryCoverage=68%, HitCoverage=28%, E-value=2e-19, Identity=55%"; Hit description =Integral membrane protein-like
MEVQSTLIGRKQVLSNSGIASISVVLIALVIGGTDRCLDSKESTLVTALIDGVIGHYACYNGDTWSSELDILCKAEPRIITTFKVVGVDGPILTFKMVKPTKFNIYNNSMCPGFARQD

SEQ ID NO: 81308 - protein, 302 aa, Zea mays
  Coding DNA Sequence Number=SeqID_39529
  Gene Ontology: Mol. function=ferredoxin-NADP+ reductase activity; Cellular component=thylakoid membrane; Biological process=electron transport
  Homolog annotation: Hit_ID=Q9SLP6; Match level="QueryCoverage=47%, HitCoverage=43%, E-value=9e-46, Identity=69%"; Hit description =Ferredoxin
  Pfam annotation: Domain name=NAD_binding_1; Domain location=123-228; Score=61.9; E_value=2e-15; Accession=PF00175.11; Description =Oxidoreductase NAD-binding domain
  Subcellular localization annotation: CTP_CleavageSite=42; ConfidenceScore=5.24e-01
MPRLSLTVTDDAAAMPFVLRLGGSPALRPGSQSPSWLRFGGRAGARKALFCSAEDARRCGSDDDAEAEECRRRGGSRVPSDRRIRGRNAAATVGDLQSGDNVQITGPVGKEMLMPKDPNATIIMLATGTVQRSGLALPGCSNEQLVALQGGQYIDLYKEEFRKMKERASENFRVDYAVSREQTNAAGERMYIQTRMAEYKEELWELLKKDNTYVYMCGLKGMENGIDDIMVSLAEKDVWIRCTRNFCNDSTETLGALFGSNNACDFRVKPTKFNIYNNSMCPGFGCDWKKIEEHVGTKTTVQ

SEQ ID NO: 81309 - protein, 94 aa, Zea mays
  Coding DNA Sequence Number=SeqID_39530
MRLMVLVMAMVLVSGILSVWKGYIGLITWVMIKLGFLLVVSIATTAQAKMKLWKETSRSSKTTTSSRCGLAATPSRLPVKAAFIYVSFPHFDLL

SEQ ID NO: 81310 - protein, 135 aa, Zea mays
  Coding DNA Sequence Number=SeqID_39531
MPNYAFFESLRMGLERFLECLSVRTCSMDDRPGKQCNHEGGYEIDGLVMAMVLVSGILSVWKGYIGLITWVMLKLGFLLVVSIATTAQAKMKLWKETSRSSKTTTSSRCGLAATPSRLPVKAAVIYVSFPHFDLL

SEQ ID NO: 81311 - protein, 84 aa, Zea mays
  Coding DNA Sequence Number=SeqID_39532
  Subcellular localization annotation: CTP_CleavageSite=70; ConfidenceScore=5.24e-01
MRVSGILSVWKGYIGLITWVMLKLGFLLVVSIATTAQAKMKLWKETSRSSKTMTSSRRGLAATPSRLPVKAAVIYVSFPHFDLL

SEQ ID NO: 81312 - protein, 111 aa, Zea mays
  Coding DNA Sequence Number=SeqID_39533
MGSSSLRAERESRLVGGYEIDGLVMAMVLVSGILSVWKGYIGLITWVMLKLGFLLVVSIATTAQAKMKLWKETSRSSKTTTSSRCGLAATPSRLPVKAAVIYVSFPHFDLL

SEQ ID NO: 81313 - protein, 194 aa, Zea mays
  Coding DNA Sequence Number=SeqID_39534
  Gene Ontology: Mol. function=hydroxymethylglutaryl-CoA reductase (NADPH) activity; Cellular component=integral to membrane; Biological process=lipid metabolic process
  Homolog annotation: Hit_ID=Q42466; Match level="QueryCoverage=51%, HitCoverage=14%, E-value=3e-10, Identity=49%"; Hit description=3 -hydroxy-3-methylglutaryl-CoA reductase
MAKISARETTWSGVEARIFSRPPPHQVHQRRGEHHREDEVRVPDRQRQRVPSAEKMRFVCRIGSASPACTRTCCPSPSVACWRRRELPCGGGTLRRTSIAIGCVGLARRRSTARRQGGGAEQWPGVWRFDLGGGSISTRGGGGGAAAAHAGWGRGRRGDKRGRERADGVDLRKRADGADLPKAEPGEAAYPLQP

SEQ ID NO: 81314 - protein, 139 aa, Zea mays
  Coding DNA Sequence Number=SeqID_39535
  Subcellular localization annotation: CTP_CleavageSite=6; ConfidenceScore=5.17e-01
MRFVCRIGSASPACTRTCCPSPSVACWRRRELPCGGGTLRRTSIAIGCVGLARRRSTARRQGGGAEQWPGVWRFDLGGGSISTRGGGGGAAAAHAGWGRGRRGDKRGRERADGVDLRKRADGADLPKAEPGEAAYPLQP

SEQ ID NO: 81315 - protein, 214 aa, Zea mays
  Coding DNA Sequence Number=SeqID_39536
MSSPWFLSVLPKIFLSNNLMKATTGGDPDGDGDDDYNDGSLSHNTELSEEKEPEGWIARPITRDVARGCHFHDALDTLLCWAFDRHTWSIEYHCVVYQHRRGGVADGLDLKYYPRRSTVSAGGVIVSPVGEGNPRLNSMVNLAVVLNIELDHALDELGKAQAEIAELRAERAACHYRDDGSPTPVVIQHPYHSPPRGRYAYGTPNCRIQIDLEP

SEQ ID NO: 81316 - protein, 99 aa, Zea mays
  Coding DNA Sequence Number=SeqID_39537
MHGLFRGSGLAGKGSAGRSTVAGDRVAAGMLSAGQTPVVSGSDDEQLVVPECVSKDLPEQQPGEDDEQLVVPECVAKDLPEQQPGEGKCPLTYYVLHTL

SEQ ID NO: 81317 - protein, 261 aa, Zea mays
  Coding DNA Sequence Number=SeqID_39538
MSTKESYRRVRVHVSGKADRAEGLLRLRDTDTSLITFREKLRCRWRGSSSTLGVNSTFGEVRPSLRQQHGRRISAPKDDVSTTLGPSPLGSPPRTRPEQTARSAAPKPQPAVPRGHQPGSWPWQLDSDVGPDQAPADEAPFFEPTLPLSVLAPLPPAPAHRRAAEGLDSHNEQTPTLKVPLQTELRFRPRGYKQPLYQEAHGTTNSKRLTAARSDSSGNDLRLGRQDSCSNGFRADAAAERLSPTKDENQPFKPGDGGPGV

SEQ ID NO: 81318 - protein, 130 aa, Zea mays
  Coding DNA Sequence Number=SeqID_39539
  Subcellular localization annotation: CTP_CleavageSite=35; ConfidenceScore=5.18e-01
MASATRLQCRSRQWTARPGSGRRSSLFRANFASIRADTATSGSGLDSHNEHTLALKVPLQTKLRFRPHGYKQPPHRRACGTTNSKRLTAARSDSCSNGFRVDAAAERLSPTKDENQPFKPGDGGPGVQAE

SEQ ID NO: 81319 - protein, 164 aa, Zea mays
  Coding DNA Sequence Number=SeqID_39540
KGTELGWKQPRRELAHAMDSRGKRWGARPTRLLVDHGDTLLPSAMDPGREVLLPCAHLNLRRVASRVSRERKGAMEQGKMERGAGHGEPAGGHGQRGASCRGASLGKGAMVVGVLGYCRDGARPCRKEPRGEGRPAEGGAGLGAMGGREEAPCALGKKAWGRKG

SEQ ID NO: 81320 - protein, 186 aa, Zea mays
  Coding DNA Sequence Number=SeqID_39541
MGAWLLELHRRHGSRELLLAGSKGTELGWKQPRRELAHAMDSRGKRWGARPTRLLVDHGDTLLPSAMDPGREVLLPCAHLNLRRVASRVSRERKGTMEQGKMERGAGHGEPAGGHGQRGASCRGASLGKGAMAVGVLGYCRDGARPCRKEPRGEGRPAEGGAGLGAMGGREEAPCALGKKAWGRKG

SEQ ID NO: 81321 - protein, 247 aa, Zea mays
  Coding DNA Sequence Number=SeqID_39542
MTRHGAVPNTNTTMWVGTAQIERSTRCGGDPGLLFCGGREEVVAAAFSGRRQGEATGGVAPMGAWLLELHRRHGSRELLLAGSKGTELGWKQPRRELAHAMDSRGKRWGARPTRLLVDHGDTLLPSAMDPGREVLLPCAHLNLRRVASRVSRERKGAMEQGKMERGAGHGEPAGGHGQRGASCRGASLGKGAMVVGVLGYCRDGARPCRKEPRGEGRPAEGGAGLGAMGGREEAPCALGKKAWGRKG

SEQ ID NO: 81322 - protein, 244 aa, Zea mays
  Coding DNA Sequence Number=SeqID_39543
MELSQTPTRRCGSGLHRSNEARDVEGIRGCCFVGEERRLLLLHFLGAGKGKLQGGVAPMGAWLLELHRRHGSRELLLAGSKGTELGWKQPRRELAHAMDSRGKRWGARPTRLLVDHGDTLLPSAMDPGREVLLPCAHLNLRRVASRVSRERKGAMEQGKMERGAGHGEPAGGHGQRGASCRGASLGKGAMVVGVLGYCRDGARPCRKEPRGEGRPAEGGAGLGAMGGREEAPCALGKKAWGRKG

SEQ ID NO: 81323 - protein, 177 aa, Zea mays
  Coding DNA Sequence Number=SeqID_39544
MSNQRGDPGPRVSAMCDAQNCTRLHLGRMHQAAIPDGYPISARYPMGTGTAGKFISCYRNLWLANMSSPPMDLEKSVPRVDPFGGVDVTLREGKLELYSTLMSSTCQAGTNEFSRKNVLGIGNATLENDHHVAGANANEWREKEEDLINRHSAPHGVQQVDEHEQQDKAFTGRCSYP

SEQ ID NO: 81324 - protein, 76 aa, Zea mays
  Coding DNA Sequence Number=SeqID_39545
MAMCDAQNCTRLHLGECTKLLYPISARYPMGMGTGKMRPRRWKKRRFANFTLISTKRTKPVGARLAEGPQNVFTSV

SEQ ID NO: 81325 - protein, 401 aa, Zea mays
  Coding DNA Sequence Number=SeqID_39546
  Homolog annotation: Hit_ID=A0BVG6; Match level="QueryCoverage=45%, HitCoverage=9%, E-value=8e-08, Identity=26%"; Hit description =Chromosome undetermined scaffold_13, whole genome shotgun sequence
  Pfam annotation: Domain name=zf-CCHC; Domain location=1-18; Score =26.3; E_value=4.5e-05; Accession=PF00098.13; Description=Zinc knuckle
  Pfam annotation: Domain name=zf-CCHC; Domain location=365-382; Score =25.3; E_value=6.6e-05; Accession=PF00098.13; Description=Zinc knuckle
  Pfam module annotation: Pfam domain module=zf-CCHC::zf-CCHC; Domain location=1-18::365-382
MDCYNCGELGHLAHQCNKPKKNKFKGKKEDDSDDEKKEKKFFKRKDGKQKRFHKKKNGKAYIVGDWLTDIESSSGSSSSEEENDEKVAVIVGDFSSPPPSPSSTSHLCLMARGERKVQNDINIADDSDSDSDEEFASPSYDELADLLKEYTQIIRKSKAKCDRLKNENESLNAKYDIVIKASDEIKEENKTMSSTVNELTNSLKDAKEKYDKLNEANRELQNRLAINPVVKLDVATSCDDLIQEEQTSLHAELTEKVEVLTLDNQKLKNYLTDATTRGKVAIENNDFNNELAVDNQRLKNEVKKLKSENEHLATSVQKFNKGQYLQNELLMNTVMKNNKSGIGYNAFVQKKAITQYKPKQTHKPIKCFECGNEGHFAHNCKAKPPTEREMCLWAISKYFGD

SEQ ID NO: 81326 - protein, 401 aa, Zea mays
  Coding DNA Sequence Number=SeqID_39547
  Homolog annotation: Hit_ID=A0BVG6; Match level="QueryCoverage=45%, HitCoverage=9%, E-value=8e-08, Identity=26%"; Hit description =Chromosome undetermined scaffold_13, whole genome shotgun sequence
  Pfam annotation: Domain name=zf-CCHC; Domain location=1-18; Score =26.3; E_value=4.5e-05; Accession=PF00098.13; Description=Zinc knuckle
  Pfam annotation: Domain name=zf-CCHC; Domain location=365-382; Score =28.3; E_value=2.1e-05; Accession=PF00098.13; Description=Zinc knuckle
  Pfam module annotation: Pfam domain module=zf-CCHC::zf-CCHC; Domain location=1-18::365-382
MDCYNCGELGHLAHQCNKPKKNKFKGKKEDDSDDEKKEKKFFKRKDGKQKRFHKKKNGKAYIVGDWLTDIESSSGSSSSEEENDEKVAVIVGDFSSPPPSPSSTSHLCLMARGERKVQNDINIADDSDSDSDEEFASPSYDELADLLKEYTQIIRKSKAKCDRLKNENESLNAKYDIVIKASDEIKEENKTMSSTVNELTNSLKDAKEKYDKLNEANRELQNRLAINPVVKLDVATSCDDLIQEEQTSLHAELTEKVEVLTLDNQKLKNYLTDATTRGKVAIENNDFNNELAVDNQRLKNEVKKLKSENEHLATSVQKFNKGQYLQNELLMNTVMKNNKSGIGYNAFVQKKAITQYKPKQTHKPIKCFECGKEGHFAHNCKAKPPTEREMCLWAISKYFGD

SEQ ID NO: 81327 - protein, 399 aa, Zea mays
  Coding DNA Sequence Number=SeqID_39548
MAAINGIRINGGGNGGIEAPFTHGRLGCFGFLAAAGVARPVFAGVLGTRVHVGAWAARGRLLKLWRRVAGWRARQGAAWRGSLQGRLCGVFGAGTGRGVRARGTRLEPLQARGREESRGGERNGRGEGERSRGDDIGASAAAMKAWGARLAPRVRELGLMGKKRLARHDSEQGAAPASVHNDVDSERSGRHRRGAWTVQRIGEGAGEGTCSTERRKARGESELGQGKGEGSASDFIEERERSEGSVFMAAINGIRINGGGNGGIEAPFTHGRRRCFGFLAAAGVARPVFAGVLGTRVHVGAWAARGRLLKLWRRVAGWRARQGAAWRGSLQGRLCGVFGAGTGRGVRARGLGWSRCRREAGKRAGEARETGEEREREKQRRRHRSGDGGHESLGRAAGS

SEQ ID NO: 81328 - protein, 166 aa, Zea mays
  Coding DNA Sequence Number=SeqID_39549
MAAINGIRINGGGNGGIEAPFTHGRLGCFGFLAAAGVARPVFAGVLGTRVHVGAWAARGRLLKLWRRVAGWRARQGAAWRGSLQGRLCGVFGAGTGRGVRARGTRLEPLQARGREESRGGERNGRGEGERSRGDDIGASAAAMKAWGARLAPRVRELGLMGKKRLG

SEQ ID NO: 81329 - protein, 192 aa, Zea mays
  Coding DNA Sequence Number=SeqID_39550
MPRWDRQSRVTRDQAQARDAITTWLRPLSGGRGSDDSLEAKPTRDKQSRLVLGHSWAGDIGTSHPRTCPGGTSSHDSPVATLGRYKQTRLARGQLSHPGFRGPKPGREHKHQRWHPLPLPICQGIATSHTPLPRRRGRVTLRGHYKVPLASENPLQFIGSSNAGFLPDRHRSKINQGPPYTDHSPTALAPFG

SEQ ID NO: 81330 - protein, 141 aa, Zea mays
  Coding DNA Sequence Number=SeqID_39551
MEATRKALEDLQAEHHAGVQRIAEWAGEASTTLVPLGMSPILVSEPPVSISDALPVLDSVADRLRRLDQILGARLEAEGSMLYRTVVDYILTCFRSHNPTISLALVINGPVAATEDAARESVQDAVEMVTVRFQRDPTDAE

SEQ ID NO: 81331 - protein, 116 aa, Zea mays
  Coding DNA Sequence Number=SeqID_39552
MERLQKWQQELEGKAIDVTLAEENLKEKELSLDRREMDLARRETYLTFREEMLTRRGELLAEHELEAEEKERKLEEQICQFDVAQVASGPQAMEATRKALEDLQAEHCTKVQRIAE

SEQ ID NO: 81332 - protein, 85 aa, Zea mays
  Coding DNA Sequence Number=SeqID_39553
MAESGSAGDGAAASNPLRRRARGFEDLKNHPGNWNLKCQASCALEPLLLPVGGEGEDATLLSGLRHLAIVREQSNRHGPPFVLLT

SEQ ID NO: 81333 - protein, 43 aa, Zea mays
  Coding DNA Sequence Number=SeqID_39554
MAVRWGIPALLFLETVAGFRKLVELGEEQVVQEEPHNEEFDLI

SEQ ID NO: 81334 - protein, 108 aa, Zea mays
  Coding DNA Sequence Number=SeqID_39555
MSLSLAQYCKRSGLMSRCSTRALKDKAGKSTGRRHLDRIELLVVWLLLNHLFFSYGGCETARNYPSDSGVNKWIKGTTCLALEIPVTRVILQILVTSLLVVAIQTNMV

SEQ ID NO: 81335 - protein, 238 aa, Zea mays
  Coding DNA Sequence Number=SeqID_39556
  Gene Ontology: Cellular component=nucleus
  Homolog annotation: Hit_ID=Q69LD7; Match level="QueryCoverage=77%, HitCoverage=56%, E-value=2e-30, Identity=43%"; Hit description =Putative CCR4-NOT transcription complex,subunit 7
  Pfam annotation: Domain name=CAF1; Domain location=2-196; Score= -70.2; E_value=1e-04; Accession=PF04857.10; Description=CAF1 family ribonuclease
MVDTEFLGTVYRPAGPAYKLELAERYRLLRCNVDALHPVQLGLTLFDAGCVLSSGHDGATRTVMWWSPSQRCRAEAWISIGRGSTASPRWLRSACACVSGRAGVITSRGSYDLAYLVKMMFGTGFRMPGSAAEFDAVVKAVLHRRRVFDVGEMAKLCPREHLRRGLDNVAGQLNAVRFTADAARQASYVSNPGFKEQSRIELESILGAIKSTGRRHLDRIELLVVWLLWNHIFFSYGG

SEQ ID NO: 81336 - protein, 152 aa, Zea mays
  Coding DNA Sequence Number=SeqID_39557
MDAGDRGFRTLSAHESLTPLSTYAASVNDAARQTLWSLNHTYRQELHNTKYRHLPLHIRGENQTNIVSGGANEDRLNTLAGVVAGLNTDLDSATLDLSRVHLELEDAHARIGALEAQLDGRNPPEVQVPAMALSPPRKRIRYGEPGSITRLL

SEQ ID NO: 81337 - protein, 187 aa, Zea mays
  Coding DNA Sequence Number=SeqID_39558
MEPFSPPAMLCRSGAEPDRGVILEDNLEELLPTPTLLTESLAFAARSSTSAAPAPAVQAPTPGGDDQDDFGDDDEDDDDEEDDKENVNKEQRDHYVGLWPVTEHYTSMFETGHFPNLLQDVLHALGTYVRPLYETRQVYEPPRDCYYITLIHVKVMDAGDRGFRTLSAHESLTPLSTYTASVGDAAR

SEQ ID NO: 81338 - protein, 36 aa, Zea mays
  Coding DNA Sequence Number=SeqID_39559
MEYDIILPLASHLRLRRNKTGVTSNYSSNSSYNYII

SEQ ID NO: 81339 - protein, 234 aa, Zea mays
  Coding DNA Sequence Number=SeqID_39560
  Gene Ontology: Mol. function=cysteine-type peptidase activity; Biological process=proteolysis
  Subcellular localization annotation: CTP_CleavageSite=52; ConfidenceScore=5.63e-01
MGSASGWISASLDPGLSLSLGLRRRSTPRPTQASASASASGGDLRLARPRPRLQEKSPPRPRRPWTDYANREYSTVLPLASHLRLRRNKTGVTSNYSSNRFITDFGGYGGSVLDVVQSFGPNKCLENFFMQGFIDCIRDDLLYNPDTISNTLILNVNVGTILNIEELEQHSTNLQPFSTSVLKDLLVPTLPPDEVLNQIKLVSPNQYYLSWFLCYAIVTGPFMQSTSSFVELTF

SEQ ID NO: 81340 - protein, 120 aa, Zea mays
  Coding DNA Sequence Number=SeqID_39561
MSTVGLCSLGLDMARLIARPVDVQRGSDRSGPVEPPPRAVDPPRDTPGDLTASLIGRLQIRSQRVRDQLSCPPGQFSWSRPESFGEKTPAQLPGGKFSWVWSKRSTAEVEVQLELKVQLN

SEQ ID NO: 81341 - protein, 127 aa, Zea mays
  Coding DNA Sequence Number=SeqID_39562
MEPTMLARRHIMIIVVLVATVIVIAAVVVLIIIVLFVRGADAHPMSRHWVIVVEGLHIRRFSVRRPRPVSADQKSEGQRPVELPPRTSSAGLDQRVLERKPQLSCPGASSAGYGQRGPQLKLKFSWS

SEQ ID NO: 81342 - protein, 95 aa, Zea mays
  Coding DNA Sequence Number=SeqID_39563
MESHDLWAERESRLVGGNEIDGSGYDYGAGKWYSFRLERVVNIATTAQEKMKPWKETSRSSKTMTSSRCGLAATPSRLPVKAAFIYVSFSNFDLL

SEQ ID NO: 81343 - protein, 446 aa, Zea mays
  Coding DNA Sequence Number=SeqID_39564
MGLGVCGSLCQVWVRPLGRSAVHLGNLTGGYEIDGFGYDYGAGKWYSFRLERSTFGLMLKLGFLLVVSIATTAQAKMKLWKETSRSSKTTTSSRCGLAATPSRLPVKAAMARLRHTARKSVIPFLPSRLAERPLRRPVAGQSSHLERLHHRLREEQERRRQEQQGSSFSLHQEIESVRSCSPVLPLEPPPAPPLGAPASGVAAGGDPDDGDGDDSSSHDTDFSANPEPEGWVARPITRDAARGCHFHDALDTLLRRAFDRHTWSVEYRCVVYQHSRGVYPDRWEATCLVRCPENSLQGAEACSEHYSISERDSAEAAMQDAARRALSHYCSVFGGAADGLDLKYYPRRPSGSTGGVIVSPVGEGNPRLSSTVNLAAVLNTELDHALDELSRARAEIALLRAERAERRHLDGGSPAPVGTQHLYRSPQRGHQSYGNPDCKTKITLEP

SEQ ID NO: 81344 - protein, 91 aa, Zea mays
  Coding DNA Sequence Number=SeqID_39565
MGSAAVLLFPDFLLVGFTFYIAQNIQEDYGMFVWAMQCHPCRLGAGTSLPGLVAAKVGADVTLTDIAQNAEVLNNIRSICALNDANCTVWF

SEQ ID NO: 81345 - protein, 182 aa, Zea mays
  Coding DNA Sequence Number=SeqID_39566
  Gene Ontology: Mol. function=transporter activity; Cellular component= integral to membrane; Biological process=transport
  Homolog annotation: Hit_ID=Q60DU0; Match level="QueryCoverage=65%, HitCoverage=18%, E-value=3e-52, Identity=84%"; Hit description =Putative transmembrane protein
MSCITLAGTRAAPAMLGAGTSLPGLVAAKVGADVTLTDIAQNAEVLNNIRSICALNDANCTVCIWLGRFYYVFGFLFIVLFLLVIVCGEVSLVLTYMHLCVEDWKWWWKAFFASCSVAFYVFLYSINYLVFDLRSLSGPVSATLYLGYSLIMALAILLSTGAIGFLLSFYFVHYLFSFVKID

SEQ ID NO: 81346 - protein, 201 aa, Zea mays
  Coding DNA Sequence Number=SeqID_39567
MESENEKLRKALATLLRVVQKRSCDIVDVVKSAFQPFNSPLLDEFNRALVEIDDLAKDLEDVAVQTQWEVENMANCQVNENQRQEEAVEELLIEDGSEDELLIDEESPINYEELVGYDDGRDYSTDDTYPYYSVHLYIMFHLPLLHRMGSDWHQVMSQYGSFLSQIDEQPMGTQHSEFPVDGQAEGSRTPVVPKSQLKELS

SEQ ID NO: 81347 - protein, 212 aa, Zea mays
  Coding DNA Sequence Number=SeqID_39568
  Homolog annotation: Hit_ID=Q9LGH0; Match level="QueryCoverage=48%, HitCoverage=33%, E-value=2e-09, Identity=30%"; Hit description=NAM -like protein-like
MGSDWNQVMSQYGSFLSQIDEQPMGTQHSEFPVDGQAEGSRIPAVPKKPTQRTKLANFTADEDTRVCHAWLACSTFAGYMMAVLRQNPSGLTDADKTSLAASRFAAIEKKPFHFLHCWAILKDQPKWMDNHMGQQNQHGNANPTHSNTVDVDAEESVPSSFTSKRPLGRASSKEKAKRTKSVDTSSSDSEFMTRMGDLSLERLSVYKTAVTT

SEQ ID NO: 81348 - protein, 426 aa, Zea mays
  Coding DNA Sequence Number=SeqID_39569
MESHDLRAERESRLVGKVHNLCRVFETDISAVLAVMSGQGSSSGNETDGFGYDYGDGKWYSFHLERVVSIATTAQEKMKLWKETSRSSKNTTSSRRGLAATPSRLSVKAAFIYVSFSHFDLLWLVLGTLHESLSSPSYPPALLSVRFAVPWPEIESVRSCSLVLPLEAPPAPPLGALASGVAARGDPDDGGGDDSSSHDTDFSADQEPEGWVARPITRDAARGCHFHDALDTLLRRALNQRTWSIEYRCVVYQHSRGVYPDRWEATCLVRRPENSLQGAETCSEHYSISERDSAEAAMQDVARRALSHYCSVLGGVADGLNLKYYPRRPSDSTGGVIVSPVGEDNPRLSSTVNLAAVLNTELDHALDELTRAHAEIALLRAERTERRHLDDGSPAPVGTQHPYRSPRRGHQSYGNPDCKTKINLEP

SEQ ID NO: 81349 - protein, 78 aa, Zea mays
  Coding DNA Sequence Number=SeqID_39570
MGDLASGSGGWAGVPCGGQGLGKALAPGWARCSRPIDTILEDPLDLWVAKWTGARGKNSEKRGPSKGKGNDKSCRIGA

SEQ ID NO: 81350 - protein, 41 aa, Zea mays
  Coding DNA Sequence Number=SeqID_39571
MSSTLILTDLKELEIAKWTGVRGKNSEKSGNYSKANKRQGE

SEQ ID NO: 81351 - protein, 84 aa, Zea mays
  Coding DNA Sequence Number=SeqID_39572
  Subcellular localization annotation: CTP_CleavageSite=37; ConfidenceScore=5.02e-01
MPGPRWPRRAAAQASHAGPPRWLAAPSHRAGYVELSRARAAANPLNRSIDTHLMKMSSTLILTDLEELKIAKWTGVRGKNSEKR

SEQ ID NO: 81352 - protein, 123 aa, Zea mays
  Coding DNA Sequence Number=SeqID_39573
MKVLPTLILTDLKELGVAKWTGARGKNSEKSPSPLSRLCPAPRPGLGQPGVDPSIEVGRILPAGSLRDEQRHDQQVEQPRQRMGRKANDSLGTGAIARSEHMEGRGRLVVERDRELDPDGEEA

SEQ ID NO: 81353 - protein, 174 aa, Zea mays
  Coding DNA Sequence Number=SeqID_39574
MSKNTRDTRFIPRFGHTTKVPYFLVEAPTKSRVSFNPNPPFANHKDLKWERQEVCEREWEVFLRGFSVHWQTQPKTGPVPNSVEPDQIRLNRLQIRLIRAKIRLNRLQIRLSRAKIRLNRFSKNLHITFSDMTDWQTGRSDGDRGEQCRNRVEPVLIPVEPIFETIAQILRKLK

SEQ ID NO: 81354 - protein, 95 aa, Zea mays
  Coding DNA Sequence Number=SeqID_39575
MGRERRTQTNTMSKNTRDTRFIVRFGHITKVLYFLVEAPTKSRVSFNPNPPFADHKDLKWERQEVCEREWEVYIKVPPKAGGRWGNLTEKRLNRF

SEQ ID NO: 81355 - protein, 127 aa, Zea mays
  Coding DNA Sequence Number=SeqID_39576
MGTSAAGNNAGIGGARPDAMGRAESSERSWDDAQRRSRLRAAAKTSAEETPTGRRKEEAAGAKLHGQELGANSSRRKGAGTATTVAAEETASGTAATGSGADAGADDGFRVGMGGEVRLPPRLCCFS

SEQ ID NO: 81356 - protein, 101 aa, Zea mays
  Coding DNA Sequence Number=SeqID_39577
MAFLSPRCSLSLCYAIPHVLLRPGSRRCLAKYLRYETLTDLAVLADIKTDSVIHTLESLFFSRVLTLCCLSGTIIRGTLKTPNSQLVTPISIKLQRPDGCD

SEQ ID NO: 81357 - protein, 216 aa, Zea mays
  Coding DNA Sequence Number=SeqID_39578
  Homolog annotation: Hit_ID=Q0IKM2; Match level="QueryCoverage=22%, HitCoverage=6%, E-value=2e-07, Identity=62%"; Hit description=Ca2+ binding protein cbp1
LPPKGATLEEYRKYAEASVSKERQDFLGLVNKEIELYNSMLEKEGAEGEEEAKRAYIAAREESGRRLLQKKTSHQYLLKSRRSSTTESLAEERRRAGCKQRRGSARSRPGRAWSEQDVRNGVAGEREQRGERNAMGTSAAGNNAGRGGARPDAMGRAESSERSWDDAQRRSRLRAAAKTSAEETPTGRRKEEAAGAKLHGQELGANSSRRKGAGTA

SEQ ID NO: 81358 - protein, 124 aa, Zea mays
  Coding DNA Sequence Number=SeqID_39579
MGLIDADGTAVGNHGDAMARLGHAVANGKGTSAVSSFIHDGEQGEGYRGWPGWRPAHRRRGFLPSYVYPMATAHESWRAAINGDEPPAVKTAVRRPYLIQLLYHGCIPFNSLSAELGASFSLNF

SEQ ID NO: 81359 - protein, 63 aa, Zea mays
  Coding DNA Sequence Number=SeqID_39580
MESHDLWAERESWLVGGDENDGFDYDYGNGNWYSFRLERVAFGAIYAQVNKKENGVKADIQEF

SEQ ID NO: 81360 - protein, 144 aa, Zea mays
  Coding DNA Sequence Number=SeqID_39581
MGLGVCGSLCQDDDEEDGYDYAYGNDDDEEEGFGYDYGNGKWYSFRLERVAFGAIYAQVKEKASKWISRSFRTSTSSRIRLATSPSQLPVVVRIATTAQEKMKPWKETCRSSKITTSSRRGLAATPSRLPVKAACIYVSFPHFD

SEQ ID NO: 81361 - protein, 233 aa, Zea mays
  Coding DNA Sequence Number=SeqID_39582
MGRLEPRAEWESRLVGKVCDLCSVLETDGPYQGTARKSVNPFLPSRLAERPLRRTVSGQSSQLERLHRRLHEEQERRRQEQEQDQEQQDSSPLPQQEVESERPPSPAPQPEMPPAPPQGILAAGGDPEGDRDDDDAGGSSSHDTELSKQPEPEGWISRPITRYPVASGLRPTHLVYRVPLCSLPASSRAIPGPVGGTCLVRRPDDDLRGAEAFSEHYSITERDTAEAAMQDAA

SEQ ID NO: 81362 - protein, 110 aa, Zea mays
  Coding DNA Sequence Number=SeqID_39583
MISGVQRPSHSTILSLRGILPRQQFGEGNPRLSSMVNLVVVLNTELDHTLDELGKVQAEVAELLVECAARHYLDGGSPAPVGIQHPYRSSPRGRFDYVTPDCRTRIDLDP

SEQ ID NO: 81363 - protein, 431 aa, Zea mays
  Coding DNA Sequence Number=SeqID_39584
  Subcellular localization annotation: CTP_CleavageSite=93; ConfidenceScore=5.10e-01
MGHSQNILSTKPPAKVSTSVLMALWVREGSASRGGLGQAREQGRDSVGVWGAAQARRGAAPASGEARNVGRERRNDRRFPGAGEASGRGRAPRSRARGGVGRGRLAAVGEGGRGEAWEKEEGEEKEAMVRTIQTTRTNTNYIPLPRQVLVYLVVVEEIPMDLPRIRVEIRVILEDSSEEFLPTPIPLAESLAFAVGSSSSAPPAPAVQAPAPRGNDPDDSRDDDEDNESEEEEEEENIKEEANGCSTCVGNLLRPLYETRRVCEPPRACYYITRIHVRVMDAGDRGFRTLSAHESLTPLFTYAPSVSDAARRTLWSLIHTYWQKLHNMKYKHLPLRLRGESQTNIVLGGAEEDRLNTLVGVVVGINTDLDSATLDLSRVHLELEDAHTRIAALEAQLEGRDPPEAQDPTMALSPPRKRIRYEEPGSITRLL

SEQ ID NO: 81364 - protein, 272 aa, Zea mays
  Coding DNA Sequence Number=SeqID_39585
MDLPRIRVEIRVILEDSSEEFLPTPIPLAESLAFAVGSSSSAPPAPAVQAPAPRGNDPDDSRDDDEDNESEEEEEEENIKEEANGCSTCVGNLLRPLYETRRVCEPPRACYYITRIHVRVMDAGDRGFRTLSAHESLTPLFTYAPSVSDAARRTLWSLIHTYWQKLHNMKYKHLPLRLRGESQTNIVLGGAEEDRLNTLVGVVVGINTDLDSATLDLSRVHLELEDAHTRIAALEAQLEGRDPPEAQDPTMALSPPRKRIRYEEPGSITRLL

SEQ ID NO: 81365 - protein, 178 aa, Zea mays
  Coding DNA Sequence Number=SeqID_39586
MDRTERRGELEGRVATREEAAHGDGSSGATSKGTPSRTRTRREIPAGRHGCRRLRMGKLDGWASKGELRAAMEPSWLSREGGEGAAEQERRTEGLRPGTRREKCGTGEHTRERNPAQELGWELGGRKFEQGTGQQRIERERKELGRSTAKAGERLEKKRSLRALKRKQRAAGRSGGRG

SEQ ID NO: 81366 - protein, 178 aa, Zea mays; identical to SEQ ID NO: 81365
  Coding DNA Sequence Number=SeqID_39587

SEQ ID NO: 81367 - protein, 312 aa, Zea mays
  Coding DNA Sequence Number=SeqID_39588
MRRKDGGYPPSGGLEGGKTRRIREREDMTNGRKGRAAMQAACNRAKWTRFSDSRHAQHGGPGPRVTRPARRMLHARNCTATCATTAPPRLWNQYRDSRRPSARPNSASLAQRSMRPKMGRRSGRRFAFAIMTASKKAPSLPTDQRFEGWPPEGFDNCLRSRGPYTHYWSERLGGCSRKPGSGRTIDGVNIPARELGTRPYTRAMASSHEGTTRPAEALREALRPRRSETTPPRPRGLHPAGALARTHRNKMQPRKAGPLAKKCDESLQASANTPFEARGLLSGTIIRGTLKTPNSQLVTPISIKLLRPDGCD

SEQ ID NO: 81368 - protein, 269 aa, Zea mays
  Coding DNA Sequence Number=SeqID_39589
  Homolog annotation: Hit_ID=Q6QP51; Match level="QueryCoverage=80%, HitCoverage=70%, E-value=1e-08, Identity=39%"; Hit description =Putative growth-regulating factor 1
MMTASKKGFEGWPPEGFDNRLRTRRARDDSGYVRYMAEARATLPRGSGAALANLAPAKPLTASTYQPENSEPDYAPGIRPARGLLSGTIIRGTRKTPKLGWNSRPRWIHASPEGLLKQRAHLRLARGPARAGFAEKQPWPDRLANRPDRRSIQCKDRLTPYPDARSTVDKAEPPSPTSGAIGSSASPDPRARTPPRPQKTVSASPDTRVRTQPRPRKTVSASPDPRARTQPRPRKTVSASPDPRARTQPRPRRSRRLARPWAWTDHVTG

SEQ ID NO: 81369 - protein, 51 aa, Zea mays
  Coding DNA Sequence Number=SeqID_39590
MKGIHPHHLVIRTSYCSEEEGFPHLLRSCGLRMGICKKPEYVWKEYCHTRF

SEQ ID NO: 81370 - protein, 264 aa, Zea mays
  Coding DNA Sequence Number=SeqID_39591
MENSWVIRTSYCSEEEGFPHLLRSCGLRMGIRKKLEYVWKEYRENGMEKCSMAVYLGESRSYPNHPPSKSPSSGTASQTLAKVLPERPSNSYAKTTAERKRLQALSRRDPTEDDPTIIYMAGYLHTLDTHYDDLSSHCTHLNSRVESLEQQVKELKKDKASLQECLDIAEGEEGNTREAYRTLKMDYDKKLKKLAPTKKIRKKTTSQGCQTERRKKAPPATAPARIENLSDIEDMSLASLDDLLKEFGDTLEKEFGSTSGNARV

SEQ ID NO: 81371 - protein, 163 aa, Zea mays
  Coding DNA Sequence Number=SeqID_39592
MVTTNPWMGRGKPGCVLGPALSFKDVHHPCWGGERSEPGLYLPRGSAGHLLFQLLVDATFRPLPRFSGEGGSEDLPVRFGAARVCQRGVGADVVAAGGSFPIVEAVSAAYGPASGSLALMVGSHPLSGDANESLSVAASVLGPWLLLQRSPASRPELVAPQAP

SEQ ID NO: 81372 - protein, 316 aa, Zea mays
  Coding DNA Sequence Number=SeqID_39593
MATTSPWMGRSKPGCDLGPTLSFKDVHHPCWGGEQGEPGLYLPCGSASHLFFQLLVVETILQLCGGDVLQPCQGRRTVAAQLGCNIPPSSSLSWRGRERGPAGALRSGPLFGFDGWFASLERGREREPSGGRVCPGTMAAAAEVTGESPGTCRPAGSPESLGSVGLAIRGFSCLVKGTPQPLFDEPKPGVAVSARTEAELARKEDLVGRSLAGSSVSGTDAGVDLPRPRAGLMSLGDSWPRPRGDQPSRLLEPDFWRGPWRRWPGRDDEVVLQSGDPRTASPSEARSDLAEGVVDAEGAAAPFSRQDPILQDRIIL

SEQ ID NO: 81373 - protein, 122 aa, Zea mays
  Coding DNA Sequence Number=SeqID_39594
  Homolog annotation: Hit_ID=Q06Z73; Match level="QueryCoverage=40%, HitCoverage=17%, E-value=3e-08, Identity=64%"; Hit description =Fibrillin 8
  Subcellular localization annotation: CTP_CleavageSite=50; ConfidenceScore=5.60e-01
MALAAPSSLRLLPTTPSQAPSPPCASRPRHLRELRLCQRLATAAAAAAAAAAAATAPLASSPTTSVAVEERGAGKGTPIDLAALDGTWRLCYTSASDVLVLFEAAERLPLLQVKQRVFSDLS

SEQ ID NO: 81374 - protein, 210 aa, Zea mays
  Coding DNA Sequence Number=SeqID_39595
  Gene Ontology: Mol. function=structural molecule activity
  Homolog annotation: Hit_ID=Q06Z73; Match level="QueryCoverage=55%, HitCoverage=39%, E-value=2e-23, Identity=61%"; Hit description =Fibrillin 8
  Subcellular localization annotation: CTP_CleavageSite=53; ConfidenceScore=5.62e-01
MTSVVLSPLRKQGDVNRVPVAPPAVLLQGSGTSPTATLSRIQGSSSPLTAMLACTQGSGTSLPDTLAPSYTPIVNLDPLLASIKGRSRAFLEEGGHRAEEARTAARGSGNAARIRSAWGPTNALPSRRPSYVAVEERGAGKGTTIDLAALDGTWRLCYTSASDVLVLFEAAERLPLLQVGQIYQKFECKDRSDGGIVRNVVRWSIENLLE

SEQ ID NO: 81375 - protein, 154 aa, Zea mays
  Coding DNA Sequence Number=SeqID_39596
  Subcellular localization annotation: CTP_CleavageSite=43; ConfidenceScore=5.32e-01
MPVACFSRHPAQRLPPQAPVRTQQQEANALPCSSSLPHKTAAAASSPSSIAPPAIFPLGCSTECPWEILCCAQQPRRLRTLSARCFVKPVDSTPGCPPGVCCFAQPQHRRRSPPRNPVFFVEEKASRSTLVDVQSYAQIEIAIVLTNADWVCLW

SEQ ID NO: 81376 - protein, 160 aa, Zea mays
  Coding DNA Sequence Number=SeqID_39597
MDDGELAAAAILWGREEEQGRASGIHCGRELARTMEGRGTTPCTRDIGAGRSDDRWGSSAARALSAPWEKLQGAKKEGAESTQGGGGAMGRRRAELLASCALAMEEGVGMPAAMEQGNREPREGAPSTGGRGRRSTSAGQPTPEGSWAAMGAEEAPNAQP

SEQ ID NO: 81377 - protein, 117 aa, Zea mays
  Coding DNA Sequence Number=SeqID_39598
MAKPPVSFPAEIEWGKGCVVNVEVWRNFWHYLIGRKVAREGEGSLPERWRGSTAALLAQLSSGMCGGGGRGWCGVLGLGCPFYRRPGGGEGWRQRRAPTSFHDGGHGADGDETARAG

SEQ ID NO: 81378 - protein, 155 aa, Zea mays
  Coding DNA Sequence Number=SeqID_39599
MEGRGGSTEVQPTVGIRGGSPPSVRFCDGEAVAEHEWWMRIARGGAEFRLRGPRAAGAREGERDGGDGELRRASMMAGMEQTATRRLGQAEDEGTARAQWRGLSRGLAGIDGEATRRGALGGDRAGEGWAREKELTGGVGLPVREVRARERGAGR

SEQ ID NO: 81379 - protein, 85 aa, Zea mays
  Coding DNA Sequence Number=SeqID_39600
MSRLEHASQTSPNAYALGQPYSGHHRRRSAPRHDCHDFPDLTQPSTGPLLPPGDLMVVANAGDSRVVLGTASDNGVVTPSSSSST

SEQ ID NO: 81380 - protein, 146 aa, Zea mays
  Coding DNA Sequence Number=SeqID_39601
  Subcellular localization annotation: CTP_CleavageSite=67; ConfidenceScore=5.04e-01
MAKLSDDHDGRDTLAFMRKNSGRLTRPRVRSALATLKHAPAHGPARAAPRHANLAPTFVPAAIKPTPASTIHPRTLPTLPEHEFTVVCPGNGVPTAARALATIDRPLQPSSTYPITAITVDDPPLDVTARTSRTSPSPPPDLSYRR

SEQ ID NO: 81381 - protein, 257 aa, Zea mays
  Coding DNA Sequence Number=SeqID_39602
MGIRKKPEYVWKEYRENGIEKCFMAVYLGESRNYPNHPPFQVTFIGHRFPDTCQSVARKALKQLCQNYSREISETPLRYFPPSNKNTPTWRKRLQALSGGDPTEDDPTIVYMAGYLHTLDNHYDDLSSHCTHLNSRVESLEQQVKELKQEKASLQECLDIAEGEEANTCEAYRTLKMDYDKKLRKLAPKKKIQKKTTNRGCQTEKKKKKTPPAPPPPRIDDWSDAEDISLASLDDLLKEFGDTLEKEFGSTSGNTLV

SEQ ID NO: 81382 - protein, 73 aa, Zea mays
  Coding DNA Sequence Number=SeqID_39603
MAPSPVVSLADGPAGPPAAPARALAPGWKALGSLEHPTAQRRKDFLTSYGVADYAWGFARSPNMSRRNTAKME

SEQ ID NO: 81383 - protein, 55 aa, Zea mays
  Coding DNA Sequence Number=SeqID_39604
MTSAGDATPSIGEAAPMGVTVAETFAQEPLAQRLAETPRHNKLPPPSPLPRRPAQ

SEQ ID NO: 81384 - protein, 236 aa, Zea mays
  Coding DNA Sequence Number=SeqID_39605
MELQTSACSRGNSGIDGGDDELTLPDDRSQSHQATHGNGLALKHRAAPTSNLNPPPCLRFLPDLRNILDHEEGRFASCYRCRATSTDVAAPTSRCKTPTSTRIPGTEKRSNSRRQSPGRDELQKRRLQEGSDVTVTPPSPVRDGPGFHPRKIALGMRHPQQGKRRPWASPSPRLSPKSPQHNVWPKPRDTASCLRRRRPAGAPTPTSTPAHALARDQPAGASDERHAEAANLARQI

SEQ ID NO: 81385 - protein, 143 aa, Zea mays
  Coding DNA Sequence Number=SeqID_39606
  Subcellular localization annotation: CTP_CleavageSite=40; ConfidenceScore=5.25e-01
MSDDLVVPVHFESWPRTLLSPPGSSAPCAPRTGAARQPAKVSQVGSMMLLGEISELSLEPAIEGRFDELRCVVPSGVAKKYVDAFSERQTLNKNRGGALCTGADGPRAGAGRSAAWCEARWCSLRKGGLSVAWGRTVRDLVRG

SEQ ID NO: 81386 - protein, 838 aa, Zea mays
  Coding DNA Sequence Number=SeqID_39607
  Gene Ontology: Mol. function=endoribonuclease activity, producing 5' -phosphomonoesters; Biological process=protein amino acid phosphorylation
  Homolog annotation: Hit_ID=Q9FS17; Match level="QueryCoverage=76%, HitCoverage=67%, E-value=0.0, Identity=54%"; Hit description=OsIre1p
  Pfam annotation: Domain name=Pkinase; Domain location=654-837; Score=- 105.9; E_value=0.03; Accession=PF00069.15; Description=Protein kinase domain
  Pfam annotation: Domain name=Pkinase_Tyr; Domain location=654-796; Score=-156.6; E_value=0.0073; Accession=PF07714.7; Description =Protein tyrosine kinase
  Pfam module annotation: Pfam domain module=Pkinase::Pkinase_Tyr; Domain location=654-837::654-796
MLTPSLSRNAPAISSLTISMAAEISELSLEPAIEGRFDELRYVFPSGVAKKAGRSAAWCEARWCSLRKGGLSAARGRTVRGLGQMGLTADDFRFGKSSSHVPFPIPFFAKQSSPPFRKKKVILSGVQAPTRSGPPPPPPNKLGHAQQLMRSLRGVLIPLVLLAGLAFRVDDGGAALLPLPPPALPASPSRLALPGGTPKDDGAAASRSTEVVTAGVRSTEIVAPVGPKKQSLRELLVRPQPARHEPSSLVSGEAKAETRSVLQFYDNGTIQLVDKLSQSPLWEIATGPPLSDHITTTESGPNYLIYPFNGNENMNGNSTELWEVYNGNSVRLPWKLEEFVARSPYIRDSVVTIGSKVSTVFVVDADSGEIIYRHSIPSALKELEGPGVEGAPSKLNVRTSDDSDNIIVLVRTDYSLSASDLGNHLFNWTRTSFTANYYVKYKHPDMLDQSSCLQGDIPCIRTEGLPLALPDLNSANVIVLKDGTPFVSMHGSDALEPVQTPRKLPNTAGKSNILLDDSQNQTHDVARSHAISADPEATLNPTRNTSGWLFPLFPIFLVTGYLLSLISASKSCRQFMIQLIEPFTHNKKTVDIRGRSEGTPKKRKTRKKDGLVNSSETLTASDKECSDTGGSTEAPMKNSALTDALGGRQIGKVYVSNKEIGRGSNGTIVFEGSYDGRQVAVKRLLRSHNDIAEKETRNLIISDHDPNIVRLYGCDHDSDFVYISLERCHCSLADLIQKQSYLSSGESISNNEVSMSINSKISNVKGIDVELWTQDGLPSAQLLKLMRYMNDLICFLLGVFGSRLHMPQIITPKLQRLAALFGCRCGLGAPCSRHRLVL

SEQ ID NO: 81387 - protein, 185 aa, Zea mays
  Coding DNA Sequence Number=SeqID_39608
MEASCRRDDEYSAPFDTGALFVNRLAARSLRNKCSGSAALWALRQTWPDGLCRGPQATANEAASGFRLSRKRRIIPDRRSFLEKQAKHGPSGPLRRTVRDRRMTLGQNQCKNTSFHYRLSGGKAKTVRALARTVRPQARTVRSPLLLTVAFSAVDLQGADRPHQEGGPSALSRMAPTAQEVVGGL

SEQ ID NO: 81388 - protein, 207 aa, Zea mays
  Coding DNA Sequence Number=SeqID_39609
MEASCRRDDEYSAPFDTGALFVNRLAARSLRNKCSGSAALWALRQTWPDGLCRGPQATANEAASGFRLSRKRRIIPDRRSFLEKQAKHGPSGPLRRTVRDRRMTLGQNQCKNTSFHYRLSGGKAKTVRALARTVRPQARTVRSPLLLTVAFSAVDLQGRTVRTRRADRPRSAEWPNGQEVVGGYKYNPNHLHSKHPSIPTFNIQYKS

SEQ ID NO: 81389 - protein, 338 aa, Zea mays
  Coding DNA Sequence Number=SeqID_39610
  Homolog annotation: Hit_ID=Q8S473; Match level="QueryCoverage=90%, HitCoverage=35%, E-value=2e-73, Identity=54%"; Hit description =Putative RIRE2 orf3
  Subcellular localization annotation: CTP_CleavageSite=28; ConfidenceScore=5.59e-01
MPAAQESDPQVVVAAPGQSVSRAPKVPKARMVPRPAARRTSAVPSGVEIRETSPQARLIMARSGKRSHGLTDLAPRKVLKTASASTAGAAPGLAVQLTFSQDAPQRGAQAALVAVERVPEAVPSVEVAVALGKAAGADVASGPPDMPSALAPAAADAAAVLVVERPVAADAEMAEASLLGASEEGGVETPPVPPSGSLVPARRSSEGRRQLLRFRTREASDPFFVLDDEREEQSWDELRECAEATVGSLRSSLEVFCRDVPKILQDPMDLSAAKSSFIRREVDVWGSLRSLRTSLARATARLSQQGAEVADLRLLCADLRAEAAAARAEVQRQQSEFD

SEQ ID NO: 81390 - protein, 239 aa, Zea mays
  Coding DNA Sequence Number=SeqID_39611
  Homolog annotation: Hit_ID=Q10KM6; Match level="QueryCoverage=14%, HitCoverage=6%, E-value=2e-07, Identity=79%"; Hit description =GDA1/CD39 family protein, expressed
MTVAYVVRVSSNTIQELSVLDMSCAFDDYYIEDCGVILAPEVTQRRTDNNDQFVILATVGVFFGTPEFHTNLYYSIKKGVSASTAKVPPPPPVRAPASPQSAHAASPRLPPRVPPPPPSPPTPLSVDRPRSRPPDLRIPRRKPPATSARQRRPPDLQNRLRLLEERAQEAILASCRDVLRASGFRFEDAWAKISKDRHNNRGAAEDASALANSLGVLCKACKLEAAIPISTIMNRERDR

SEQ ID NO: 81391 - protein, 48 aa, Zea mays
  Coding DNA Sequence Number=SeqID_39612
  Homolog annotation: Hit_ID=Q10KM6; Match level="QueryCoverage=85%, HitCoverage=8%, E-value=4e-12, Identity=83%"; Hit description =GDA1/CD39 family protein, expressed
MAIAGLRLLEERAQEAILASCRDVLRASGFRFEDAWAKVIPGDWMLKL

SEQ ID NO: 81392 - protein, 257 aa, Zea mays
  Coding DNA Sequence Number=SeqID_39613
  Pfam annotation: Domain name=zf-C2HC_plant; Domain location=48-91; Score=12.3; E_value=0.0014; Accession=PF07567.3; Description=Protein of unknown function, DUF1544
MSASFLFHLVSAPPAAKPSHRLDHRLQIIAVRDYRLECRRQGLPPGPSPQPTTPRALEMSSSSDGIKRFKQHIAGGFGDVEKCPKAPEVVKKEIAAYLTKIQLENEEEGCHGQWSQLQGDEKNSNGEDPNSILGTHAKAQAGSKSFVSDEWHQNKLPANSEGQQVENIVLSIPFWTKLEKCLQASQPLLIALRIADGNETPPAPGIMAAMDVNKCTINDSSKDKPQLLKEIMDCYDKRWDTQMEQKLYEAALFLNLA

SEQ ID NO: 81393 - protein, 169 aa, Zea mays
  Coding DNA Sequence Number=SeqID_39614
  Pfam annotation: Domain name=zf-C2HC_plant; Domain location=48-91; Score=12.3; E_value=0.0014; Accession=PF07567.3; Description=Protein of unknown function, DUF1544
MSASFLFHLVSAPPAAKPSHRLDHRLQIIAVRDYRLECRRQGLPPGPSPQPTTPRALEMSSSSDGIKRFKQHIAGGFGDVEKCPKAPEVVKKEIAAYLTKIQLENEEEGELCIFILKGYPILKGKGDKPKGFYKAEILPKEQKGKEKQHKKTEQDQGSRCLRTQPHSKT

SEQ ID NO: 81394 - protein, 163 aa, Zea mays
  Coding DNA Sequence Number=SeqID_39615
MPPELPSTESGMSAQLYAAAQRAQQQCPHIACQAARLIRNKCRGRAAQEPYVRVRPLAYITGSRPRGSIGTPPELGAEAYVVWSGHVSAPDPRLALVKAWVFFVPESRDLAVSGPDPAQGGPGPVPGVRARLWRFWTLPGGPVYTWRPWSCPRGGVGCCSPRD

SEQ ID NO: 81395 - protein, 113 aa, Zea mays
  Coding DNA Sequence Number=SeqID_39616
MAPLEPSTWWGQVLFTARLEITARAACLHTVVRGTPDSGYRQAPGPASGEDTSLQRWSPLLVRLPSAEVVASAGEPLGVEVVAAAGEPSVQRWPPQLASRSELATHATLLVWR

SEQ ID NO: 81396 - protein, 140 aa, Zea mays
  Coding DNA Sequence Number=SeqID_39617
  Homolog annotation: Hit_ID=Q9AX74; Match level="QueryCoverage=48%, HitCoverage=22%, E-value=2e-14, Identity=58%"; Hit description =Putative integral membrane Yip1 family protein
  Subcellular localization annotation: CTP_CleavageSite=56; ConfidenceScore=5.01e-01
MPLWPQSAPDILSLCFAPLPGSAPSINAGGSRNYIPHKPSALPSFTQPTCLLTPVCCEAQLRHHSLWATKMVSDGGYSALDDPKAPGSIPAVTGTDPQTISFTDSNLQTFSSFEARGKIARTYRKTVPPSSTTSPLASMT

SEQ ID NO: 81397 - protein, 172 aa, Zea mays
  Coding DNA Sequence Number=SeqID_39618
  Homolog annotation: Hit_ID=Q6H8E1; Match level="QueryCoverage=38%, HitCoverage=6%, E-value=4e-12, Identity=50%"; Hit description=PHD finger protein-like
  Subcellular localization annotation: CTP_CleavageSite=56; ConfidenceScore=5.08e-01
MPLWPQSAPDILSLCFAPLPGSAPSINAGGSRNYIPHKPSALPSFTQPTCLLTPVCCEAQLRHHSLWATKMVSDGGYSALDDPKAPGSIPELILDDMKDNEFVQGLDSKPPFVDLSVGTPQEDVNDSKELDTTMEPEDLPETEDDASATEKFESKSVKSSAHVNNDNFVGDV

SEQ ID NO: 81398 - protein, 179 aa, Zea mays
  Coding DNA Sequence Number=SeqID_39619
  Gene Ontology: Mol. function=carbon-carbon lyase activity; Biological process=aromatic compound metabolic process
  Homolog annotation: Hit_ID=Q69NF8; Match level="QueryCoverage=65%, HitCoverage=64%, E-value=5e-18, Identity=66%"; Hit description =Putative 2,4-dihydroxydec-2-ene-1,10-dioic acid aldolase
  Pfam annotation: Domain name=HpcH_HpaI; Domain location=1-104; Score=- 89.6; E_value=0.087; Accession=PF03328.5; Description=HpcHHpaI aldolase family
MEHGLGRIPEALACLRVLDAARTPAVLCLPEASAVWSKKALDLGPAGLILPAIESPEAAAEAVSHCRSAATRRAGKQNDPSEQLKLRGYHMVAGAVDIAMFRKATLDDVRLFREAVMEIDEEDDEDEKCEKENDGYWSDRILIKARDVARSSAQNSLSERNNLKAMGHYGLKGSFFSIL

SEQ ID NO: 81399 - protein, 1133 aa, Zea mays
  Coding DNA Sequence Number=SeqID_39620
  Gene Ontology: Mol. function=kinase activity; Cellular component =proton-transporting two-sector ATPase complex; Biological process =ATP synthesis coupled proton transport
  Homolog annotation: Hit_ID=Q6Z7G3; Match level="QueryCoverage=61%, HitCoverage=93%, E-value=1e-133, Identity=42%"; Hit description =Cingulin-like
  Pfam annotation: Domain name=DUF1090; Domain location=325-423; Score=- 33.3; E_value=0.074; Accession=PF06476.2; Description=Protein of unknown function (DUF1090)
  Pfam annotation: Domain name=DUF827; Domain location=100-487; Score= -109.4; E_value=0.027; Accession=PF05701.2; Description=Plant protein of unknown function (DUF827)
  Pfam annotation: Domain name=HpcH_HpaI; Domain location=855-1090; Score=190.1; E_value=5.4e-54; Accession=PF03328.5; Description =HpcHHpaI aldolase family
  Pfam annotation: Domain name=Pox_A_type_inc; Domain location=157-179; Score=1.0; E_value=58; Accession=PF04508.3; Description=Viral A-type inclusion protein repeat
  Pfam annotation: Domain name=Pox_A_type_inc; Domain location=383-405; Score=9.3; E_value=3.5; Accession=PF04508.3; Description=Viral A-type inclusion protein repeat
  Pfam annotation: Domain name=Pox_A_type_inc; Domain location=509-531; Score=12.0; E_value=1.5; Accession=PF04508.3; Description=Viral A -type inclusion protein repeat
  Pfam annotation: Domain name=Pox_A_type_inc; Domain location=629-651; Score=1.1; E_value=55; Accession=PF04508.3; Description=Viral A-type inclusion protein repeat
  Pfam module annotation: Pfam domain module=DUF1090::DUF827::HpcH _HpaI::Pox_A_type_inc::Pox_A_type_inc::Pox_A_type_inc::Pox_A_type _inc; Domain location=325-423::100-487::855-1090::157-179::383 -405::509-531::629-651
MDHNLDAVIIGAEGAGVIDLGADPPDSTGPHRQGGADLAPPRRRATANRTRRRRAAEAARRQPPRTASRASRPCPKASAAGHGTPRAADKSPGSGSADRKAPTPKAAASRLATTPEKGKPAKPPQEQHAQLAAIREELVKAKEQLVENEKEKCKVFAELERAKKVADEANAKLQDALDVQRRAIEAQEADKLPARESEQASIHGQQEADDAVLRSTVEQLEKARYELADAIDAKNEALSQVDDAVRASEVKAQEVEHLTVEVTRLKGLVDSKVDGNRKKTAERIQNLEEENFALKLELEKKKAAEEKAVRLERMIDELKSDVDDARNFGSKSKQLADEWQKKAQLLEVRLEEADQSNILKGESLNSAMEELDSTSSLLRDRESEVAALRDKVRFLEDELTKLKSDIVVSGQRADAAEKETTDLWTEIEGLRLKLHTVEEEKMEALNSDKNTSSEIETLNEQKNQLADELEASKDELEKIKKAMEGLASALQEMSAESREAQEKYLLKQDEMERAQAQVEELNLSLKNIKENYELLLDEANYEKVCLTKAVERLEAEAKRAHEEWQSKELSFVSSIKNSEEEIVAVRVQMDRTLEVVKEKENENTELQEKLQQLESQLMEANRIREEGNTETIRWKENILDQENELQNIKQENDDLQAKESAASEKIKELSSQLTNAKDGTINSNTKDGDNEKGGTEEDDEPVVVVAKMWENSKFADYDSAKEENDGDSQVDLESNKGDAGLDSNGLHSTKENSGRASPTKQHQQYKKKPLLKRFGGVHSHSVLPLTPRPHPGQPSRGHQSTPVATNQRRAPPATFLQYRITDRLPCRGRRSSAAASDLLSPAPSLKSRLADGDTLYVLFLLSFSRTLAELAALAGYDYVVVDMEHGLGGIPEALACLRALDAARTPAVLCLPEASAVWAKKALDLGPAGLMLPAIESPEAAAEACRYPPRGVRGAAHPIVRASAYGFDDSYLSRCEDDTLVICQVETATAIAKIDANATVDGVDVVQMGPLDLSASMGYLWDLGNRKVRATLREAERKVLEAKKKKKAAAASGGNAAYLGGKQNDPPEQLKLRGYHMVAGAVDIAMFRKATLDDVRLFREAVMEIDEEDDEDEKCEKENDGGSIRDLKEPKNF

SEQ ID NO: 81400 - protein, 92 aa, Zea mays
  Coding DNA Sequence Number=SeqID_39621
MAEERQLLRGRAPPTAARRRQDRQHRRTGNEKRELPDANGQEGEPPHKKRATVLRLFALPSSPQPAVKEANRRARSIQPSRGYAPPQFHCNQ

SEQ ID NO: 81401 - protein, 144 aa, Zea mays
  Coding DNA Sequence Number=SeqID_39622
MATARGMNSFLKADFLARAPKRHEQSLPRRAPGFPFYDMGARPHMSYKLARSVKKANRRIGSVQPPCGSTSFHLRRSQRSRRRTATQGACNRPAVIRPSIFTTTAQGACNRLAIARPLSFATADGATSSMGARAHMSYIRRVGS

SEQ ID NO: 81402 - protein, 84 aa, Zea mays
  Coding DNA Sequence Number=SeqID_39623
MFPALVLKTDKDNARDIDLESSHRHLDVEARYSQRRRIGGPRLREPIVEVYDLKEFLGGRPMLMASAKLKRCSAAPLMALAKGV

SEQ ID NO: 81403 - protein, 325 aa, Zea mays
  Coding DNA Sequence Number=SeqID_39624
  Homolog annotation: Hit_ID=Q6H7M3; Match level="QueryCoverage=34%, HitCoverage=13%, E-value=3e-38, Identity=80%"; Hit description =Putative copper-transporting P-type ATPase
MAADVAMVGDGVNDSPALAAADVGMAIGAGTDVAIDAADIVLMKSNLEDVITAIDLSHKTLSRIRLNYVWALGYVLGMPIAASVLFPFTGVVCPSSSTRNRCTLKTRPGPGRTQIWCDCEALSYSFWQALIQYTDAATALAARESLDGRSIPRLSLACSWIQQAVQKVDLFGNLWIYASVTRSTHPQAPVQAEMPADVHREAREGVLEFERAFRERFSACTLAAKRHIDSTTIFDVQGVIWILSSTSLLFLLMQALKRIKLYELKHKDISKAEKDIVLSSTSIVMLGIFVLHTPFAKAINGAALHLFSFAEAINIGRPPRNSLRS

SEQ ID NO: 81404 - protein, 168 aa, Zea mays
  Coding DNA Sequence Number=SeqID_39625
  Homolog annotation: Hit_ID=Q2L3A5; Match level="QueryCoverage=27%, HitCoverage=15%, E-value=2e-09, Identity=78%"; Hit description=SEC14 cytosolic factor (Secretion factor 14) family protein
MDSTVTAQHVTKFPHYSLHPVVVFLRTNQTKHQPGIRPADVHREAREGVLEFERAFRERFSACTLAAKRHIDSTTIFDVQGVIWILSSTSLLFLLMQALKRIKLYELKHKDISKAEKDIVLSSTSIVMLGIFVLHTPFAKAINGAALHLFSFAEAINIGRPPRNSLKS

SEQ ID NO: 81405 - protein, 325 aa, Zea mays; identical to SEQ ID NO: 81403
  Coding DNA Sequence Number=SeqID_39626
  Homolog annotation: Hit_ID=Q6H7M3; Match level="QueryCoverage=34%, HitCoverage=13%, E-value=5e-38, Identity=80%"; Hit description =Putative copper-transporting P-type ATPase

SEQ ID NO: 81406 - protein, 744 aa, Zea mays
  Coding DNA Sequence Number=SeqID_39627
MYVWAVTSYGGQPSVEVFAKNYCLHWQKRKIGNKIAQFGSCTFTPRTGKTSAEVVEIVPCARNKWGNWWDFWFYVSPGEVEDLPGLPPTILCSHCYVAFPPFEVAEEDEDEGALRVALGTRLGTGRSVPPLDADQLVQSPAFVVDLRGRNPAAFVREVEAEAAKIVGRYVPRTETLRSWDIHGSNVRLNRVFELNCLPYAGYPGDDDADAAVCRGKNVVTTADEGPSRGTAPSAAAKKRKLGTTTEGLRASKRFAADLLETCVVPRETMSSLELRESSARMLKVTGGRWPRNVPIPRTAGEDMFTSRLAREMKIFPYGRNVVAVVSAVMEKGRQDAPRKRRAFARVGDPRRGVKIARASVKPAASIQERKLPSPPRAAETAVGGAEVSMDISVEDYLVGGVAIFDAHTGRGPAGAESGQLAVVPASVSAGPVVVAAGAKGSSQDPWSRFCASGEIASAATVKDVAGSVARQLKHVAAFAEHIASGALTSEFAAERRRLEGRIERLRTQHTEAVRDKSAAENKSRNLLEKLLVAEAEKEDLGRRLAVEKEDADRARTEAQAARAEANLALKRATDAESGHRSLRGYLDKAEASTHTGVDRAHALLVDAYRELGARTAPFDTSGEEVGLRFLGWLQEELELLSSIVTGLMSFASLITCEGAANALSREGCKHFEVFDWSNEDFDRGIFQVEDEVLKRSAGALYDRMWGPHSRDNVWERSDRALEQMMNDEEVDDFGGLESSVIEST

SEQ ID NO: 81407 - protein, 177 aa, Zea mays
  Coding DNA Sequence Number=SeqID_39628
  Subcellular localization annotation: CTP_CleavageSite=3; ConfidenceScore=5.36e-01
FVCARRGRGCRAKGGVFAFAPTFALRGTSSTKSAVTEDHPHIKQTARRRRQYVAMSSSSSTASASPAVPSSEETLSDLAVMELQPSHTVEFGTSRISSVHVLEMQWLGYFGNGVGRAPGAEEVLEPEGELVVHQLMPNAVVALAKYVWAVTSYGGQPSVEVFAKNYCLHWQKKENRK

SEQ ID NO: 81408 - protein, 69 aa, Zea mays
  Coding DNA Sequence Number=SeqID_39629
MGEGARASGARGSSGQGRVSCELHARRGRGEGGRAQLGGGYAGTTGLTARAREQRERGERRRARERRLR

SEQ ID NO: 81409 - protein, 142 aa, Zea mays
  Coding DNA Sequence Number=SeqID_39630
MEASEIRGMVPRTLVKREMKAQRVSPGSCLTAWSRLPRARLLRAHVARGARNRPALGHLSPEPHSPSPPPPFALQQTPLPPLPRCAHARAPPPQIPAVPSSFPGHRWSSAVSVATPRRSATAAPGHRRAIAVAEESPEPSLE

SEQ ID NO: 81410 - protein, 160 aa, Zea mays
  Coding DNA Sequence Number=SeqID_39631
MEEVTHRGVLEEPAREACTGPPNFGADDLGVTEHVVSGEGRPVVRTRHSGHRHVRPTHWFGAARSRNHMPASCAGCGGTTARAGGGAEDEDDAGAERQTPGAMERTPGGGTSGRRAVAGGGRAVETGEALGFAGGVVGAWAVSVSGSRLPADRREERPGD

SEQ ID NO: 81411 - protein, 121 aa, Zea mays
  Coding DNA Sequence Number=SeqID_39632
MAAGKSSSQNRLWAFKKDFGHGGSDRGILEEPAREARTGPPNFGADDLGITEHVVGGEGRPVVGDRPPRARRPSGAGEARATAGTGATTALSGGDRYGVGGRVSVTAVALVFGAWNRVWFV

SEQ ID NO: 81412 - protein, 209 aa, Zea mays
  Coding DNA Sequence Number=SeqID_39633
MAGSKDSSEVSTSNIIKPTWETLPAEEQLLFEERQDQLIKEAKAKFVADFKVDRNNKVVQQRAIDLASLRPTTNIPNVSDTNELQSLKSYIDEHGAESSGGIRSDSGGRRDAVRWPVGWQAELGALRGTGTGRATVATRRLGLGGRRETLGAGGRHRRGHSASRSRPRRTAEGTTASRLNFRRRRLCPEGVRVSDGLEFGWDLEPLGLG

SEQ ID NO: 81413 - protein, 217 aa, Zea mays
  Coding DNA Sequence Number=SeqID_39634
  Subcellular localization annotation: CTP_CleavageSite=54; ConfidenceScore=5.10e-01
MARWWRSSIRGGAIASEQRAQGPVPPTTASRCYAMQRIPRIQQRTYQSGRCPRRVSTADSGPRRRHDLGDEFQRTTVDLRPRRPNGNQPEGKSKAARLIYSAMESNQAMESLWPRGEGADYLGPLGNEKCAANTGDVGLTSEVPLSVERGEGWPMGPTAQNRDKKATNNVNPTTISQGGGGGGGIQIMKRLTPLLQRSYQHCRWQTVTGVTVQRAWV

SEQ ID NO: 81414 - protein, 75 aa, Zea mays
  Coding DNA Sequence Number=SeqID_39635
MSGGAPDTVRWHTGQSAQNRDKKATNNVNPTTISQGGGGGGGIQIMKRLTPLLQRSYQHCRWQTVTGVTVQRAWV

SEQ ID NO: 81415 - protein, 202 aa, Zea mays
  Coding DNA Sequence Number=SeqID_39636
MIGFRTDDTTEATAMKTLTTFCGYHPLEMVMYPLGLFPAKKKDDPIWCNRVSHVKDVRAMYPDLVGRVTIQCMSALYRLQARATLWHILLTLLKPPSSPSTAERTSWSTVTPGFKEQSQRLYPLPTSHVTHQPRGRDSHTPLPRKRGRATLQGLYKVPLASKNPLQFIGSCNAGFLPDRHRSKINQGPPYTDHSPTALAPFG

SEQ ID NO: 81416 - protein, 138 aa, Zea mays
  Coding DNA Sequence Number=SeqID_39637
MGRDSHTPLPRKHGRATLRGLYKVPLASENPLQFIGSSNAGFLPDRHRSKINQGPPYTDHSPTALAPFGTLLGKKWSRAQLAWDLRFQLWPGRTIIEEGRGLGVNVHMTQTDLGMDRGLNIGIYGVSFVNLPTEGGID

SEQ ID NO: 81417 - protein, 139 aa, Zea mays
  Coding DNA Sequence Number=SeqID_39638
  Gene Ontology: Mol. function=peroxidase activity; Cellular component =integral to membrane; Biological process=response to oxidative stress
  Homolog annotation: Hit_ID=Q1AFF4; Match level="QueryCoverage=62%, HitCoverage=34%, E-value=4e-40, Identity=88%"; Hit description =Ascorbate peroxidase
  Pfam annotation: Domain name=peroxidase; Domain location=8-116; Score= -90.8; E_value=0.024; Accession=PF00141.13; Description=Peroxidase
MSAEFAYSGWLVSRNLPDVFAVQRNMTEKGRPVAVVRTESGEGLLGLSLPHPTHGRCHKERSGFEGAWTTNPLVFDNSYFKELLSGDKEGLLQLPSDKALLNDPVFRPLVEKYAADEKAFFDDYKEAHLKLSELGYADA

SEQ ID NO: 81418 - protein, 523 aa, Zea mays
  Coding DNA Sequence Number=SeqID_39639
  Homolog annotation: Hit_ID=P93404; Match level="QueryCoverage=24%, HitCoverage=51%, E-value=5e-64, Identity=92%"; Hit description=L -ascorbate peroxidase 1, cytosolic
  Pfam annotation: Domain name=TFIIB; Domain location=197-256; Score =3.6; E_value=0.0068; Accession=PF00382.10; Description=Transcription factor TFIIB repeat
  Pfam annotation: Domain name=peroxidase; Domain location=320-504; Score=46.2; E_value=6.8e-12; Accession=PF00141.13; Description =Peroxidase
  Pfam module annotation: Pfam domain module=TFIIB::peroxidase; Domain location=197-256::320-504
MTLASLARALGRICQQLADCGSAASSAALGKPVVDETVDWRYILARPQFRRLFSNDTLGRTTRTTTPRVKRRCRKEMGAKSLNRSVEQIWKVAGSEVCDCREEPLHEVQVQHRGCHGDEHGLQRSAGRFLLAIRYSDSMQYSRSNLFGMQYSRKRYFVLEDAALRCFKSAPSSKGELFFVLQVCAVLQGRGGFFHGVRSISFGVDLQEIRLMGVLQTGRKPSRLCGAALYIAALSHGCNYTKADIVSVVHVCEATLTKRLIEFENTDSGSLTIEEFLATADESNEEPVSKHSPKSGEILCKHKDKGFEHFAHGLCEKCYNKTRLHLLLTLRLIAQFTKLSGGLEGGSDPPAFQRAEKKRLEAAKRAEEAAAAKEAALEESLCDTQNSEVESAMTPRKDKPQPPPEGRLPDATKGSDHLRQVFGKQMGLSDQDIVALSGGHTLGRCHKERSGFEGAWTTNPLVFDNSYFKELLSGDKEGLLQLPSDKALLSDPVFRPLVEKYAADEKAFFDDYKEAHLKLSELG

SEQ ID NO: 81419 - protein, 431 aa, Zea mays
  Coding DNA Sequence Number=SeqID_39640
  Gene Ontology: Mol. function=transcription factor activity; Cellular component=nucleus; Biological process=regulation of transcription, DNA-dependent
  Homolog annotation: Hit_ID=Q2TQ37; Match level="QueryCoverage=81%, HitCoverage=94%, E-value=8e-87, Identity=49%"; Hit description =Transcription factor AP2D8
  Pfam annotation: Domain name=AP2; Domain location=177-247; Score =105.8; E_value=1.2e-28; Accession=PF00847.10; Description=AP2 domain
  Pfam annotation: Domain name=AP2; Domain location=291-363; Score =58.5; E_value=2.2e-14; Accession=PF00847.10; Description=AP2 domain
  Pfam module annotation: Pfam domain module=AP2::AP2; Domain location =177-247::291-363
MEESDLGGNLGKQTEEDKAAGESGDEGKIERSQSINLNRVPAVAVEAMSTQGNCETHGAAVPGTKDAGTGKAGQSSGDRQEEKLPKCEQVDYGSEVEGCADDENPGKRAALVTLVGNEYCGDEDERVQVLTIVKKDEHADDIVDRINPGTVAGYSEVKGAVGASAATSAVRPAGSRSSSFHGVTRHRWSGKYEAHLWDSSCRVEGRRRKGKQGSYDTEEKAARAYDVAAIKYWGENTRLNFPASSFPLASVISISYMMALYMSELLQISQYGKELEDIRDLSREECVTYLRRRQKDGRWQARIGLVAGTRDIYLGTFSMQNMNFDLPMPLKKTEEEAAEAYDIAAIEIRGKNAVTNFDRSNYVDKGYGVQRRRDLDLNFTSVNQVLAAASEETKTFPWFQFTTTCNQNYGTSDFTWSLVDLSSYHVNLFTT

SEQ ID NO: 81420 - protein, 174 aa, Zea mays
  Coding DNA Sequence Number=SeqID_39641
  Gene Ontology: Mol. function=transcription factor activity; Cellular component=nucleus; Biological process=regulation of transcription, DNA-dependent
  Homolog annotation: Hit_ID=Q2TQ37; Match level="QueryCoverage=56%, HitCoverage=27%, E-value=2e-23, Identity=54%"; Hit description =Transcription factor AP2D8
  Pfam annotation: Domain name=AP2; Domain location=34-106; Score=58.5; E_value=2.2e-14; Accession=PF00847.10; Description=AP2 domain
MALYMSELLQISQYGKELEDIRDLSREECVTYLRRRQKDGRWQARIGLVAGTRDIYLGTFSMQNMNFDLPMPLKKTEEEAAEAYDIAAIEIRGKNAVTNFDRSNYVDKGYGVQRRRDLDLNFTSVNQVLAAASEETKTFPWFQFTTTCNQNYGTSDFTWSLVDLSSYHVNLFTT

SEQ ID NO: 81421 - protein, 74 aa, Zea mays
  Coding DNA Sequence Number=SeqID_39642
MGDHVSGCVRGKVCGQVHSGTRLTDLPYFSIQTCNFKNSQLKIQTSKQSDLRLYGKITKKSDQRLFEKLGKSTT

SEQ ID NO: 81422 - protein, 138 aa, Zea mays
  Coding DNA Sequence Number=SeqID_39643
MQYNGSSSLISCEKQTIRIEFLSLQVTALVPTITGMGDHVSGHVRGYVCGQVHSGTRLTDLPYFSVVFAGGGTRLASIHWHLARSKHANTTALSRFGQIQACTFKNSQLKIQTSKQSDLRLSGKNWTDSVFIFETFIT

SEQ ID NO: 81423 - protein, 105 aa, Zea mays
  Coding DNA Sequence Number=SeqID_39644
  Subcellular localization annotation: CTP_CleavageSite=41; ConfidenceScore=5.06e-01
MGGSGAATCLEKVTYSEASPITYSTLATFQTLCLGWLARSRVMMVSCSVVGPRPRSGEAVTSPEAEAESYPGGWHSSRNGANSDVILSERSVKGRSDCGHFDLAN

SEQ ID NO: 81424 - protein, 307 aa, Zea mays
  Coding DNA Sequence Number=SeqID_39645
MSPEAIVRDDVAKATKAKTENNKNIKAVGRSVKGRSDCGHFDLANCGARVRIRCQTIFALNAPAIWSVGKAIWPRLLHNEACPSWASGESRVRPPPEEALGRGWFVDAVDGVVTGEPPGVCYPAGPLNLRPLCDELEPEVAVSAWIETESARKEASSAREQAASQAEEVQQRRLELGQVIRERDQPRSHAAEAMSRADVLGGQLAEATERAAEASARAGTLAESLAVRAQARCWRPPLEWRSFRPYRRPRLGQVPPRVEMSPRVLLLPLPMSEPAGIVCLKTTYPSESYFSRKVMSEDSVIDIVEKA

SEQ ID NO: 81425 - protein, 203 aa, Zea mays
  Coding DNA Sequence Number=SeqID_39646
MGAQKSGFTGDSEQRAVEEDGAEGATGKLHGWAGTGREAGSSDHGDLPAQGRAPWGTREKLGEGSYDATAIAVLHDEQSAVQRSLAGHSFHGRWRSVAAWGEVERRQATAAMGRAQRLWELEGGTSREMGAELEQGLAAGHGKVAGHQGKEQGRAGEAGHGEELEKRRYFCVRIFSNAHWIDTLFNYVSHFPNLETKIRGLPT

SEQ ID NO: 81426 - protein, 227 aa, Zea mays
  Coding DNA Sequence Number=SeqID_39647
DNVFDDSTANDATTSSGEKQAAELGGRLRAWGNGKRDGQGVRLGLGNSRSSSDEHGPRKTERHYQARDGAQRTPMGAQKSGFTGDSEQRAVEEDGAEGATGKLHGWAGTGREAGSSDHGDLPAQGRAPWGTREKLGEGSYDATAIAVLHDEQSAVQRSLAGHSFHGRWRSVAAWGEVERRQATAAMGRAQRLWELEGGTSREMGAELEQGLAAGHGKVARHQGKEQG

SEQ ID NO: 81427 - protein, 88 aa, Zea mays
  Coding DNA Sequence Number=SeqID_39648
MGCTGGAPNGCSPRPSNGFLRIIHSKVFLLCLFAENYLLLFVEIGMKLFALCFGGIHFVPCTDVTVLKNILIIPGRPPMVWARDGLVR

SEQ ID NO: 81428 - protein, 251 aa, Zea mays
  Coding DNA Sequence Number=SeqID_39649
MVALKASSERLASGGDHLRTSGGDHLCTSGLPAVATTLVYSLRALRGCDRFEKYTDNSWASPPMGVGKGRLEITLLLLWFFHISSLFFIASFSSLLSASAVGKSNKRKREPTPPSEDFGDSEYSEEEFSSESEGSPAPVSPPASSDDSDDSQGIAVEVWTYIRAVERSGLEGSDESEFSSEEEDSDGGEGEDDDDDDGGDGDGDGSGGGSGRGDGSKGSTRGGSSTGSTRGGSSKGSTRGGGGGSSSKASG

SEQ ID NO: 81429 - protein, 190 aa, Zea mays
  Coding DNA Sequence Number=SeqID_39650
  Gene Ontology: Mol. function=drug transporter activity; Cellular component=membrane; Biological process=multidrug transport
  Homolog annotation: Hit_ID=Q8H3W4; Match level="QueryCoverage=93%, HitCoverage=30%, E-value=2e-39, Identity=54%"; Hit description =Putative ripening regulated protein DDTFR18
  Pfam annotation: Domain name=MatE; Domain location=14-138; Score =21.8; E_value=0.00013; Accession=PF01554.9; Description=MatE
MPNVMDGGDRLRQGLMPDSQLSTSIIVMCTRVSNELGARNIANARKALTVSLALSLMLGVVFLLLLGLGHDLWVRLFTTSEAVVSAFASMTPLLIGSVVLDSTQGVLCGVTRGCGWQHLAAWTNLVAFYVIGLPLAILFGFTLAFQTKGLWMGQICSLLCQNCVLFFITLRTNWQELDLTMFNKDNDFVC

SEQ ID NO: 81430 - protein, 209 aa, Zea mays
  Coding DNA Sequence Number=SeqID_39651
  Gene Ontology: Mol. function=drug transporter activity; Cellular component=membrane; Biological process=multidrug transport
  Homolog annotation: Hit_ID=Q8H3W4; Match level="QueryCoverage=93%, HitCoverage=30%, E-value=9e-53, Identity=64%"; Hit description =Putative ripening regulated protein DDTFR18
  Pfam annotation: Domain name=MatE; Domain location=11-157; Score =56.2; E_value=1.1e-13; Accession=PF01554.9; Description=MatE
MPNVMDGGDRLRQGLMPDSQLSTSIIVMCQNTEAISYMITYGFAAVISTRVSNELGARNIANARKALTVSLALSLMLGVVFLLLLGLGHDLWVRLFTTSEAVVSAFASMTPLLIGSVVLDSTQGVLCGVTRGCGWQHLAAWTNLVAFYVIGLPLAILFGFTLAFQTKGLWMGQICSLLCQNCVLFFITLRTNWQELDLTMFNKDNDFVC

SEQ ID NO: 81431 - protein, 149 aa, Zea mays
  Coding DNA Sequence Number=SeqID_39652
  Gene Ontology: Cellular component=integral to membrane
  Homolog annotation: Hit_ID=Q8LNN5; Match level="QueryCoverage=90%, HitCoverage=47%, E-value=8e-48, Identity=84%"; Hit description =Putative transmembrane protein
  Pfam annotation: Domain name=DUF1084; Domain location=1-148; Score =17.6; E_value=8.4e-11; Accession=PF06454.2; Description=Protein of unknown function (DUF1084)
  Subcellular localization annotation: CTP_CleavageSite=34; ConfidenceScore=5.11e-01
MTAYFTAPWAGGATSTSRRALRHRLGRRAGKHPPASLRFPDPCLVQLIRIECRVSEYGWTTQKVFQFLNFLVNGVRSVVFVLRRNVQLVEPEDMPGLAFFTTYALLVLFWAKIYYQARAMSTDWLRPTFYWINGVVYAIQVKIEDIYQQ

SEQ ID NO: 81432 - protein, 149 aa, Zea mays
  Coding DNA Sequence Number=SeqID_39653
  Gene Ontology: Cellular component=integral to membrane
  Homolog annotation: Hit_ID=Q8LNN5; Match level="QueryCoverage=90%, HitCoverage=47%, E-value=1e-48, Identity=80%"; Hit description =Putative transmembrane protein
  Pfam annotation: Domain name=DUF1084; Domain location=1-148; Score =16.3; E_value=9.9e-11; Accession=PF06454.2; Description=Protein of unknown function (DUF1084)
MTAYFTAPWAGGVTSTSRRALRHHLGRRAGKHPPASLRFPDPCLVQLIRIECRVSEYGWTTQKVFQFLNFLVNGVRSVVFVLRRNVQLVEPEDMPGLAFFTTYALLVLFWAKIYYQARAMSTDWLRPTFYWINGVVYAIQVKIEDIYQQ

SEQ ID NO: 81433 - protein, 90 aa, Zea mays
  Coding DNA Sequence Number=SeqID_39654
  Gene Ontology: Mol. function=diphosphate-fructose-6-phosphate 1 -phosphotransferase activity; Cellular component=6-phosphofructokinase complex; Biological process=glycolysis
  Homolog annotation: Hit_ID=Q41140; Match level="QueryCoverage=73%, HitCoverage=10%, E-value=1e-23, Identity=80%"; Hit description =Pyrophosphate--fructose 6-phosphate 1-phosphotransferase alpha subunit
MATVTNLKNPVNKVAMWCDSYFVYDDCESDDQYYYFIRLIGRKASHVALECALQSHPNMVILGEEVAASKLTIFDITKQICDVVQARAGK

SEQ ID NO: 81434 - protein, 309 aa, Zea mays
  Coding DNA Sequence Number=SeqID_39655
  Gene Ontology: Mol. function=diphosphate-fructose-6-phosphate 1 -phosphotransferase activity; Cellular component=6-phosphofructokinase complex; Biological process=glycolysis
  Homolog annotation: Hit_ID=Q41140; Match level="QueryCoverage=96%, HitCoverage=50%, E-value=7e-81, Identity=56%"; Hit description =Pyrophosphate--fructose 6-phosphate 1-phosphotransferase alpha subunit
MKVLGHVCYHIIAAGLNEYMATVTTLKNPVNKWRCGATPISYYYFIRLMGRKASHVALECALQSHPNMVILGEEVAASKLTIFDITKQICDVVQARVEKDKNHVVILFLRALWRIFLSYMLCFRKSMASMAKLFLLRISLLSFHHGHLHSEFLAPFIRKHIETEKLLAQLVETEMRRRLVLGHVCYHIIAAGLNGYMATMTDLKNPVNKWRCGATPISSMMTVKRWSCGPLATQIGKPDVHMASVDLKEKAYDVLRQNSSSFLLEDVYRNPGLLQFEGPGVDSNPISLCVEDQDYMSRIRQKSHLFILV

SEQ ID NO: 81435 - protein, 156 aa, Zea mays
  Coding DNA Sequence Number=SeqID_39656
  Homolog annotation: Hit_ID=Q6QP51; Match level="QueryCoverage=38%, HitCoverage=30%, E-value=1e-11, Identity=64%"; Hit description =Putative growth-regulating factor 1
MELRSPNDKAERRRPSWAESSPTRSKALLLRRGGWVPHVKQAGSERKKPNRRARCVQPPSGYKRLSTFAQISGRSGRRFAFAIMTASEKAGPSEGFDSRLRSRGPYTYYWSEVRRPAPRKGSTTASGYSGFAPTTDQGFEGWPPKGSQPPQTQSEG

SEQ ID NO: 81436 - protein, 197 aa, Zea mays
  Coding DNA Sequence Number=SeqID_39657
  Homolog annotation: Hit_ID=Q6QP51; Match level="QueryCoverage=30%, HitCoverage=30%, E-value=2e-11, Identity=64%"; Hit description =Putative growth-regulating factor 1
MELRSPNDKAERRRPSWAESSPTRSKALLLRRGGWVPHVKQAGSERKKPNRRARCVQPPSGYKRLSTFAQISGRSGRRFAFAIMTASEKAGPSEGFDSRLRSRGPYTYYWSEVRRPAPRKGSTTASGYSGFAPTTDQGFEGWPPKEARGLLSQTQLRPNRLTASTYQPENLGPDRTPGLRPARMRERPDQPKHYARH

SEQ ID NO: 81437 - protein, 429 aa, Zea mays
  Coding DNA Sequence Number=SeqID_39658
  Gene Ontology: Mol. function=cysteine-type peptidase activity; Biological process=proteolysis
  Homolog annotation: Hit_ID=Q53MK8; Match level="QueryCoverage=63%, HitCoverage=28%, E-value=4e-29, Identity=29%"; Hit description=Ulp1 protease family, C-terminal catalytic domain, putative
MKNVDRPPSNPKRIIIQSTQECFSVDIPRAPAGTVRPETRHAADEDDDFMPLSKKRNLDDSPGKVLKKRLNIRCNPQDVLVSIQILNDRQQQAIARRGFSSILDMRLDALGSRSHLAWLMEKLDHNDMTIRAGPGKELKITKDTVHLILGLPNAGGGTALGIDEAVAANNLRAELGLSKEDFGVTALQDRLRKGSDDDLSIRCFFLILFNRLLFPTVSWGITNHEVLLTEEMDRFHQMDWCQLIFNDLCQAAKKWHNRSVTNVSTTIYGCSIVILLYYLDHLHDSAAPENKRGTPRIKYFDRNIIQALTRADKGKIRKGEEAFGHCSHSIHIELPLIRDLISSKLNQLPSRHRLGFIEKLSHFDAEVGKACSVIKQTLQQIVEKQYNLSDVFGELIDEVLRAEAGDNEDAYDVQKTTSKSDNILPQTAG

SEQ ID NO: 81438 - protein, 68 aa, Zea mays
  Coding DNA Sequence Number=SeqID_39659
MKNVDRPPSNPKRIIIQSTQECFSVDIPRAPAGTVRPETRHAADEDDDFMPLSKKRNLDDSPGKVLKK

SEQ ID NO: 81439 - protein, 87 aa, Zea mays
  Coding DNA Sequence Number=SeqID_39660
MSNECGLSSNFSRMCSREFGTTLIFGSPGFEFQKTENADDHWEEFLGCDRYSARALEVDALLSEVKDSLGAPKVHPMGVAPEFRMDY

SEQ ID NO: 81440 - protein, 148 aa, Zea mays
  Coding DNA Sequence Number=SeqID_39661
MAGVGRSTRAGGDARRRQGVRPGHGEIEQLDGSERFTGCQRRHERKELGGDSLDSSVHARRRKTEDRLGTGSCSVTKVPVSECLVPRSNCAKTMSNEFGLSSNFSRMCSREFGTTLIFGSPGFEFGKTENADDHWEGFIVQGLIWGFI

SEQ ID NO: 81441 - protein, 138 aa, Zea mays
  Coding DNA Sequence Number=SeqID_39662
MAGVGRSTRAGGDARRRRGVRPGHGEIEQLDGSERFTGCQRRYGCKESVGDSLDSSLHARRRKTDVRLGTGSCSVTKVPVSECLVPRSNCAKTVSNEFGLSSNFSRMCSRESGTTLIFGSPGFEFRKTENADDLWEEV

SEQ ID NO: 81442 - protein, 201 aa, Zea mays
  Coding DNA Sequence Number=SeqID_39663
NRGGRKGGGAFRRRDCSGEVVEDEWEVSGITTRGPWGAREDMSARNWAETHWIARSTRGGGRPKSGEVDLGPPVKSGRVRGLGKLHGLLAELAEALARPEDGWSGLATMAEALAAMAGGIELAGAKGKWLAGEGSCSVTKVPVSECLVPRSNCAKTVSNEFGLSSNFSRMCSREFGTTLIFGSPGFEFRKTENADDLWEEV

SEQ ID NO: 81443 - protein, 79 aa, Zea mays
  Coding DNA Sequence Number=SeqID_39664
MELHEVLRVYPCKESKKDSTWSSVYCLGANGSRRGSRVLTSVVQGDNCITFLGKASIMNLPWFTHGFQGFGAPPPLKHM

SEQ ID NO: 81444 - protein, 317 aa, Zea mays
  Coding DNA Sequence Number=SeqID_39665
  Homolog annotation: Hit_ID=Q9ZSE8; Match level="QueryCoverage=25%, HitCoverage=32%, E-value=4e-39, Identity=87%"; Hit description =Chitinase
  Pfam annotation: Domain name=Glyco_hydro_19; Domain location=1-156; Score=-17.2; E_value=1.3e-08; Accession=PF00182.9; Description =Chitinase class I
MASDDQYAWGLCYKEEIRPASNYCDATDEQWPCYPGKSYHGWGPIQLSWNFNYEPAGQALGFDGLRNPELVANCSQTAFRTALCELGETPLVWEDARSAEFDGKMRWRRSHARRAMARFGLTQRIYNFLPYPHMQPQICDLHRCMQAEPTAVGLVGGVCFGLLTVVGFDPMAQGDSRGAKESTRARNRRKTHRGARSTFAGGRVKSDDAESVSPVRQSSIPGSGSFTGTRGDSLEGRTGRGMARLADNEQSKVPECVVGDLPELQPGEGNHPPWGRCSSVVRLAKPYGPVSPRGIFGKGGDAGNMEDFEEFQDYDEF

SEQ ID NO: 81445 - protein, 215 aa, Zea mays
  Coding DNA Sequence Number=SeqID_39666
MAFGDFADKPVRRQAESGGEERLENNQLALRLGDFLRPRGPSDSVAQSSPTAAYLQYGLTSSVTHRIQQSRRRATLPPSRHSTSPQTRRRPAAWRWRKKKRMAWLRTVGGGGRFASLEPERRRAKGAAEEKEQQGGGRLGFYGARKAEFKQRRPRPPFIGRARLLGKPTTRQAATLRETRNPTVRRPSTVTSKTPAEPLRARAASPPSSDVFGTR

SEQ ID NO: 81446 - protein, 172 aa, Zea mays
  Coding DNA Sequence Number=SeqID_39667
MASLRTVGGGGRFASLEPERRRAKGAAEEKEQQGGGRLGFLRSAESRIQTAPPPPPFIDRARLLGKPTTRQAATLRETRNPTVRRPSTVTSKTPAEPLRARAASPPSSDVFGTRYFRIQNYEYGARPGRSLNQTKVECSRSCAQGSFGAMAEGGTDLKMKRLRGPRQISISR

SEQ ID NO: 81447 - protein, 161 aa, Zea mays
  Coding DNA Sequence Number=SeqID_39668
MAWLRTVGGGGRFASLEPERRRAKGAAEEKEQQGGGRLGFYGARKAEFKQRRPRPPFIGRARLLGKPTTRQAATLRETRNPTVRRPSTVTSKTPAEPLRARAASPPSSDVFGTSREQVPTPVFTEDDVDFSIDARERSASSPFLLLRLSRFSGSSSWWGRW

SEQ ID NO: 81448 - protein, 251 aa, Zea mays
  Coding DNA Sequence Number=SeqID_39669
MAWLRTVGGGARFASLEPERRRAKGAAEEKEQQGGGRLGFYGARKAEFKQRRPRPPFIGRARLLGNPQPDRPRRFGKPAIQQYAVHQRSHQKPPRNHFERGQRLRHLATSSAPELKVDDLPECGCAWRPADFGTPLQGTTQGDARVCQMRRGLDVGDGARDGVGDSAFGCRGGEDRGLGLCGGEERRGGTTAFAIPGPFPERKNKATASMRQRRRVRVSAVEKENATAVERQWENLCVFGGRGREEAHGGD

SEQ ID NO: 81449 - protein, 246 aa, Zea mays
  Coding DNA Sequence Number=SeqID_39670
  Homolog annotation: Hit_ID=Q6QP51; Match level="QueryCoverage=90%, HitCoverage=97%, E-value=1e-32, Identity=42%"; Hit description =Putative growth-regulating factor 1
MRDRERGYFERILLSEGNGPRALLLIRGSKVAPCGVRQPPQSTWAPSPLLIKGSKAGPSEGFDGRPRACRVRDDSGYVRYMAKARATLPRYPKTFLRPAGTICNGIPPERGTEPLDPIKWVRENNIIHPVPTTVPTIRVKLTTVSHDHPEFSLERNRELRVTRPRPRPQPRPREQVSASPDPRPQPQPRSREKVSASPDPRPRPQPREESQPSPTLASASGEVTASPDLGLGPTTPQGIHHYPTPS

SEQ ID NO: 81450 - protein, 103 aa, Zea mays
  Coding DNA Sequence Number=SeqID_39671
  Subcellular localization annotation: CTP_CleavageSite=39; ConfidenceScore=5.31e-01
MQEACNRTAVVHPFSFVATGGPAWRPGPTCHVTGTPVTTCKETAPPLAPMLRLVGTTEPVQRLEAAPRMPQQCQLSATVTGIRKGDILKGSFSAKETDPKPSY

SEQ ID NO: 81451 - protein, 254 aa, Zea mays
  Coding DNA Sequence Number=SeqID_39672
  Subcellular localization annotation: CTP_CleavageSite=78; ConfidenceScore=5.60e-01
MASSPVLATSPPFPLPGHLKKDRPEPLVPPHQASTTQPPSLRPNRARRRRPSPLRVSSALLSLVAYGQIALALKLRLSVANLAHTFSSLIAPGSLDGDFTAASARHRAMDRPPQAPSGQIGPTPMIPYPRPCFATTPPSQNWSPGGEPPRGFTGGWAPAGSPPPSPLDAVSPPSSGTWAHAHGTVPAPFPHWRACNKNTPTWRKRLQALSRRDPTEDDPTIVYMAGYLHTLDNHYDDLSSHCTHLNSQVESLEQ

SEQ ID NO: 81452 - protein, 144 aa, Zea mays
  Coding DNA Sequence Number=SeqID_39673
MGVDPIWPEGAWGGRSMARWRALAAVKSPMRLPGAISEEEVAGEGEGRRGGEHRRARHDGGDGAKWRWDGSGRQGVGGEGSARAQCVGAHDANRAGERVNGEEMGRTVAGGERADSLVTGEGEKGLTGGARLPERGGREVGERG

SEQ ID NO: 81453 - protein, 125 aa, Zea mays
  Coding DNA Sequence Number=SeqID_39674
  Subcellular localization annotation: CTP_CleavageSite=38; ConfidenceScore=5.43e-01
MPPWFGRSRSRRRPPPPVPVARVAPTTSDTNPHIGVTVATSRRSLTTPPELYFRRLELNKETTQNPILGGKIGILFDQDCNLADGEYILVPEQGAAQEVAPDPAPEPAPEDLPATALEGKPRFYA

SEQ ID NO: 81454 - protein, 125 aa, Zea mays
  Coding DNA Sequence Number=SeqID_39675
  Subcellular localization annotation: CTP_CleavageSite=38; ConfidenceScore=5.10e-01
MPPWFGRSRSRRRPPPPVLVARVAPTTSDTDPHIGVTVATSRTSLTTPPELYCRRLELNKKTTQNPILGGKIGILFDQDCNLADGEYILVPEQGAAQEVAPDPAPEPAPEDLPATALEGKPRFYA

SEQ ID NO: 81455 - protein, 82 aa, Zea mays
  Coding DNA Sequence Number=SeqID_39676
  Subcellular localization annotation: CTP_CleavageSite=14; ConfidenceScore=5.07e-01
MGTAEALCLAVLPSAQSSTSDRASPSTARSLDPITTETSSILTGDPAGDLGLFLEYLTVRTCSWMITRENSTTMRVEWDALS

SEQ ID NO: 81456 - protein, 84 aa, Zea mays
  Coding DNA Sequence Number=SeqID_39677
MQIIERKCEAQKGRKKTLDKLTDQPGNLIPIDVAEVPDLSASRDNSDLAEDDPCDPTTTSKPEAPMQSLNQLPVVTDLADARSA

SEQ ID NO: 81457 - protein, 201 aa, Zea mays
  Coding DNA Sequence Number=SeqID_39678
MVKKTQCNQQQMTRKHPNSTMQIIERKCEAQKGVGIRSNLNFYVVLWTVGEKTLDKLTDQPRNLIPLDIVEVPDLSEKKTLDKLTDQPGNLIPLDIVEVPDLSEKKTLDKLTDQPGNLIPLDIVEVPDLSEKKTLDKLTDQPGNLIPLDIVEVPDLSVSGDNSDLAEDDPCDPTTTSKPEAPMQSLNQLPVVTDIADARSV

SEQ ID NO: 81458 - protein, 98 aa, Zea mays
  Coding DNA Sequence Number=SeqID_39679
MQIIERKCEAQKGAGIRRKKTLDKLTDQPENLIPLDIVEVPDLSIIERKCEAQKGAGIRSNLNFDVVLWTVGEKTLDKLTDQPGNLIPLDIVEVPDLS

SEQ ID NO: 81459 - protein, 235 aa, Zea mays
  Coding DNA Sequence Number=SeqID_39680
MALPALEGSRGHRLRRGWLHGGTEVVDEKFPSTATQFVRAVALVCFLRMQLGREQRLPTRPPRQQQGLPRQQAFPPVPRRHPLLALAMVAATWGHDWSGIARGPTIWTPGGQPEELRNGTAQLGGHSAERFRCREDRVGEDDESAKRVPRFSGTDEARTRAKPRKTANSAPPDPGLGLGLSPGDGELRSARPRARTRAKPRKTANSAPPDPGLGLGLSPGRRRTPLRLTQGSDSG

SEQ ID NO: 81460 - protein, 149 aa, Zea mays
  Coding DNA Sequence Number=SeqID_39681
  Homolog annotation: Hit_ID=Q9AVA6; Match level="QueryCoverage=38%, HitCoverage=12%, E-value=4e-18, Identity=70%"; Hit description =Putative selenium binding protein
  Subcellular localization annotation: CTP_CleavageSite=35; ConfidenceScore=5.09e-01
METPEGQLYGPQEVNPRNSATAPRSSEVVPPSDFVAAKTGSVKTMSLPSGSRDSVEQMSARRETLYLVNWLHGDIRQRNIEDPANPFLVGQVWVCGLVQKGNDVVYVNDDGIEQRYNLPQVKKIGDTLDFEIKRWSARKEGNLCALLST

SEQ ID NO: 81461 - protein, 239 aa, Zea mays
  Coding DNA Sequence Number=SeqID_39682
  Subcellular localization annotation: CTP_CleavageSite=4; ConfidenceScore=5.51e-01
MSSRSLMRRVFPPSKPPDGGNPPSFRLTVGGTQLRGSWYLSAIVRLQGFSSHSPVAPLRWWSPETVTTSSWVGRSKSGCDLGPTLSFKDVHHPRWGGCRAEPALYLPRGFVGHPLPRHSRERALTGPAGGPDFDNAGLVDGRRRHLQRVGFVGLAPGGPFCRRAAAAPCTREDHPRCRALLGWRSCSGVVLPLHRDGAFTRRPESLGSVGLAVRGSSSLVKETPRPLFDEPRPGVAISV

SEQ ID NO: 81462 - protein, 287 aa, Zea mays
  Coding DNA Sequence Number=SeqID_39683
  Homolog annotation: Hit_ID=Q6QP54; Match level="QueryCoverage=45%, HitCoverage=45%, E-value=2e-31, Identity=62%"; Hit description =Putative kinase
MRRKDGGFPPFGGLEGGKTRCIRRSGRRFAFAVITAPKKGPGKGDTPKRILPCEGTGLRAPPTDQRFEGWPSEGFNSRLRSRGPYTHYWSEVRRPAPRRAPRPPQATRAPHPLLIRGSKAGPRRVHSRLRRRARDDQGYVRYITKAQAALPRARTRAKPRKTANSAPPDPGLGLGLSPGRRRTPLRPTQGSDSGSAPEDDELHFARPQGSDSALASAERPPPRPTQGFGLSLGHGRQTRPRLRRSLHVARPRAQARHINRKRHHHPTPSRLGPQRTRPVSHLASSAR

SEQ ID NO: 81463 - protein, 150 aa, Zea mays
  Coding DNA Sequence Number=SeqID_39684
MAPKPLGFYTKNVQYHLGHPLEKVELETRTFDMPWHGFCRVMLSRICPGVSQLSDSPRCQEEPSEKTVHVSVKLPERGIGLCFTGEAGPRSPDFNRPSATVDRDCNLADGEYILVPEQGAAQEVAPDPAPEPAPEDLPATALEGKPRFYA

SEQ ID NO: 81464 - protein, 294 aa, Zea mays
  Coding DNA Sequence Number=SeqID_39685
MAPKPLGFYTKNVQYHLGHPLEKVELETRTFDMPWHGFCREVLSRICPGVSQLSDSPRCQEEVCAGPLQRFARLRPLATFEHWKKQTATCSTPSAAPEHAPRRARAKPVPWSASAAINAQELWLYPSARAQASPELSSPPFAHARRARGHPSPCHRRPANPAIPNPVQPSEKTVPVSVKLPERGIGLCFTGEAGPKSPDFNRPPATVDRGTPCTSLRFLARLDSLDLHEAPYALELNYAAVDRPEHTPPTSSPACSRGPGDSGHPRRRAVPRRDRQTLPEPTLHFAGTPSPPKL

SEQ ID NO: 81465 - protein, 66 aa, Zea mays
  Coding DNA Sequence Number=SeqID_39686
MAQISGHRFAHAHLAPGPTCRPSMPLALGPTDDEQPVVPACVAEDLPEQQPGEGKCPLTYYVLHTL

SEQ ID NO: 81466 - protein, 128 aa, Zea mays
  Coding DNA Sequence Number=SeqID_39687
MAPPCPRGALPLASRQRQNPLLRIQSAQIQSDGPISIRPDLIPTARSGSGRSPLSPSPTPCDWDRSVRPSRPRPLMPLGRWSDAPTFVCARSFDNEQPVVPECVAEDLPEQQPGEGKCPLTFYVLHTL

SEQ ID NO: 81467 - protein, 85 aa, Zea mays
  Coding DNA Sequence Number=SeqID_39688
MEIPRGRARRMTMATGTSIMASPGGIVDPRLRNFSPGIEPQVATGYSPELSIAVAPPGIRVPPRSSVSVLGRYGVAVDLGMGGGD

SEQ ID NO: 81468 - protein, 85 aa, Zea mays
  Coding DNA Sequence Number=SeqID_39689
MEIPRGRARWMTMATGTSIMASPGGIVDPRLRNFSPGIEPQVATGYSPELSIAVAPPGIRVPPRSSVSVLGRYGVAVDLGMGGDD

SEQ ID NO: 81469 - protein, 85 aa, Zea mays; identical to SEQ ID NO: 81467
  Coding DNA Sequence Number=SeqID_39690

SEQ ID NO: 81470 - protein, 51 aa, Zea mays
  Coding DNA Sequence Number=SeqID_39691
MEIPRGRARRMTMATGTSIMASPVEEPVTEDPGEQQVEVAEQELIEGKLCP

SEQ ID NO: 81471 - protein, 223 aa, Zea mays
  Coding DNA Sequence Number=SeqID_39692
  Gene Ontology: Mol. function=transporter activity; Cellular component= auxin efflux carrier complex; Biological process=auxin mediated signaling pathway
  Homolog annotation: Hit_ID=Q5SMQ9; Match level="QueryCoverage=77%, HitCoverage=29%, E-value=5e-88, Identity=94%"; Hit description=Auxin efflux carrier component 1
  Pfam annotation: Domain name=Mem_trans; Domain location=2-190; Score =88.2; E_value=2.5e-23; Accession=PF03547.8; Description=Membrane transport protein
MDRDAEAGDGKAAAAGGDPSTVAAPTAMPPTSVMTRLILIMVWRKLIRNPNTYSSLIGVIWSLVCFRWNFQMPAIVLQSISILSDAGLGMAMFSLGLFMALQPRIIACGNKVATFAMAVRFLTGPAVMAAASFAVGLRGTLLHVAIVQAALPQGIVPFVFAKEYNVHPDILSTAVIFGMLIALPITLVYYILLGLRWFDEDKTDRDTLRFIQHKTKACGDVSP

SEQ ID NO: 81472 - protein, 530 aa, Zea mays
  Coding DNA Sequence Number=SeqID_39693
  Gene Ontology: Mol. function=transporter activity; Cellular component= integral to membrane; Biological process=auxin mediated signaling pathway
  Homolog annotation: Hit_ID=Q6L5F6; Match level="QueryCoverage=99%, HitCoverage=100%, E-value=1e-139, Identity=50%"; Hit description =Putative auxin efflux carrier component 3b
  Pfam annotation: Domain name=Mem_trans; Domain location=9-525; Score =669.5; E_value=2.5e-198; Accession=PF03547.8; Description=Membrane transport protein
MITGTDFYHVMTAVVPLYVAMILAYGSVRWWRIFSPDQCSGINRFVALFAVPLLSFHFISTNNPYTMNLRFIAADTLQKLMVLAMLTAWSHLSRRGSLEWTITLFSLSTLPNTLVMGIPLLKGMYGDFSGSLMVQIVVLQCIIWYTLMLFMFEYRGARMLITEQFPDNAGAIASIVVDPDVVSLDGRRDAIETEAEVKEDGRIHVTVRRSNASRSDIYSRRSIGLLQHHAAPQQPDQRRDLLAAVRRATRPRGAPASTTTTSTPWKAATNGQAKGEDLHMFVWSSSASPVSDVFGGGAPDYNEAAAAKSPRKMDGGKDRDDYVERDEFSFGNRGAMDRDAEAGDGKAAAAGGDPSTVAAPTAMPPTSVMTRLILIMVWRKLIRNPNTYSSLIGVIWSLVCFRWNFQMPAIVLQSISILSDAGLGMAMFSLGLFMALQPRIIACGNKVATFAMAVRFLTGPAVMAAASFAVGLRGTLLHVAIVQAALPQGIVPFVFAKEYNVHPDILSTAVIFGMLIALPITLVYYILLGL

SEQ ID NO: 81473 - protein, 143 aa, Zea mays
  Coding DNA Sequence Number=SeqID_39694
MARGNLYPSMVDFKLALRQYAINKEFEFGTTKSDKLSRLKEQMLTTHGVAQKASPILRNEPNAKVLQTWMQDTYKPLVDVGAGMMNTLFEVEFAIMMLQGICLKVEFVIEIPKKATKLASEAEARRREAWAGSFPTHIRVSPL

SEQ ID NO: 81474 - protein, 129 aa, Zea mays
  Coding DNA Sequence Number=SeqID_39695
MARGNLYPSMVDFKLALRQYAINKEFEFGTTKSDKLRWKAEVLHRSPNGVIRIDTIIVDGKPLVDVGAGMMNTLFEVEFAIMMLQGICLKVEFVIEIPKKATKLASEAEARRREAWAGSFPTHIRVSPL

SEQ ID NO: 81475 - protein, 312 aa, Zea mays
  Coding DNA Sequence Number=SeqID_39696
MTMLVDYTTILDRPCVSVEGPTQQGIENVVEGLHQQPGCPEVVQGASLAKVQGKTASQTPPPAEARGRVLLLLLLASVLLLLVQVTMQSLQVTGLTWHRAKQGTLRQAGRQKGDHRLTYSAPDTGHLQNTSNRRLRLDRAGAGAQARLTSGARGVRARVREALSVVRVVRSESDGGDQTPTTQERLTSEARGVSGRGGGRTDRAGPTPEDLGADRWAKGAGRACAKRYPRFGPCDQDRTEGIRPGEKQTAAGGAAPLRGGEVARVEAGGTIGEIGHGDGCLTSGRNSGRLGAVLGEWMAGNMGAGLQRRLAA

SEQ ID NO: 81476 - protein, 111 aa, Zea mays
  Coding DNA Sequence Number=SeqID_39697
  Subcellular localization annotation: CTP_CleavageSite=62; ConfidenceScore=5.54e-01
MAHRSSSGPPEAFSPPFFPLCRGFMAPSPPLSSLCRPLPLCPTPATPDPLAHACLNSGDLTVAERSSAARSRSPLLDNEQFEVPECVVGDLPEQQPGEGKCPLTHYVLHTL

SEQ ID NO: 81477 - protein, 278 aa, Zea mays
  Coding DNA Sequence Number=SeqID_39698
MALSPSSLRKGDAGAYDKSREEARGLLSHPATAKLLTASTNQLDNSEPDHAPGLRPGRMRERSDRPRHHEKHSDLRGVNPLLRGLGGYTRRFGLGHNRRLRLARPQAPASGGGLRLARPPDSASTSVSGRIVSSPDPGLGLKRSLRLARPWTRTDRANRGYIITLSLASSGYKEQDRRPIWLTPATGNDGAPHATMTPVALSPLRQQGDVSRILAALPAVLLQDLGASPTATLSRVQGSSSPPTATLACTQGSGIPLPDTLAHSYAPPLYVWTLSLRL

SEQ ID NO: 81478 - protein, 308 aa, Zea mays
  Coding DNA Sequence Number=SeqID_39699
  Subcellular localization annotation: CTP_CleavageSite=35; ConfidenceScore=5.46e-01
MAASGWSSSHRRVHASPEGRLRQQAPPQLSRSPARAGFVVKQPWPDRLTNRPLRRRIQCRGRLTPYPDTCASVGQAEVTAVTSPLFFTVRYDGKTAPLAPLRLSCQPPRRRLTTSHDQPPSSALGTTGGSASPDLRLRPQEEVSASPDPRTRPRPRSREESCPRPTPASASREVSASPDLGLGPTRANRGYIITLSLASSGYKEQDRRPIWLTPATGNDGAPHATMTPVALSPLRQQGDVSRILAALPAVLLQDLGASPTATLSRVQGSSSPPTATLACTQGSGIPLPDTLAHSYAPPLYVWTLSLRL

SEQ ID NO: 81479 - protein, 55 aa, Zea mays
  Coding DNA Sequence Number=SeqID_39700
MKLTIVAQKVIKDQRTLAFTKQMLRVFDLIELEEFDHLVAMLDRRFLEAQKRTAI

SEQ ID NO: 81480 - protein, 65 aa, Zea mays
  Coding DNA Sequence Number=SeqID_39701
MTDFLSAPVRVFFHDRDSFLSFEESTIKHGDQVIKLFEFYEIEDPKHLFGEGKCPLTYYVPYESS

SEQ ID NO: 81481 - protein, 71 aa, Zea mays
  Coding DNA Sequence Number=SeqID_39702
MAWPRPPARASFPLDRGSFLSFEESTIKHGDQVIELFEFYEIKDPEHLFGEGKCPLTHYVLFTYNSLSRIT

SEQ ID NO: 81482 - protein, 79 aa, Zea mays
  Coding DNA Sequence Number=SeqID_39703
MRPRPTRPPHAQPLPFPSLFHGWEEQDEENRDSFLSFEESTIKHGDQVIELFEFYEIEDPEHLFGEGKYPLTHYVPFTI

SEQ ID NO: 81483 - protein, 279 aa, Zea mays
  Coding DNA Sequence Number=SeqID_39704
MHELDGALPERTGHGGVVFCGGGDQFGGKGEFSGYGGQLRGRTGSFDGSVQFGRATQAARDKEEYQRSEYVFNAVAAIPNYTNQNFPLRKMPPRTRRTARKHTGPIGVPCHQLAPRHDNSSSGSNDPIGVLEAELQVELRRRTNIWVADGDRINELRRDVSHLRDQLADRDLALDWVVQSRSLAWAKEETAQARVAELNLAVDNLQTYCNTLHEEVHVLYSQLHPSEPADPVESEVGPSHVAREVLGGELDLFRPPPSMRLVDEWSPTPDDEASKSNRK

SEQ ID NO: 81484 - protein, 202 aa, Zea mays
  Coding DNA Sequence Number=SeqID_39705
SFDGSVQFGRATQAARDKEEYQRSEYVFNAVAAIPLAPRHDNSSSGSNDPIGVLEAELQVELRRRTNIWVADGDRINELRRDVSHLRDQLADRDLALDWVVQSRSLAWAKEETAQARVAELNLAVDNLQTYCNTLHEEVHVLYSQLHPSEPADPVESEVGPSHVAREVLGGELDLFRPPPSMRLVDEWSPTPDDEASKSNRK

SEQ ID NO: 81485 - protein, 470 aa, Zea mays
  Coding DNA Sequence Number=SeqID_39706
  Gene Ontology: Mol. function=metal ion binding; Cellular component =endoplasmic reticulum; Biological process=ubiquitin cycle
  Homolog annotation: Hit_ID=Q5Z880; Match level="QueryCoverage=99%, HitCoverage=93%, E-value=0.0, Identity=74%"; Hit description =Putative Synoviolin 1
  Pfam annotation: Domain name=PHD; Domain location=259-300; Score=0.0; E_value=0.057; Accession=PF00628.19; Description=PHD-finger
  Pfam annotation: Domain name=zf-C3HC4; Domain location=260-297; Score= 42.4; E_value=1.6e-09; Accession=PF00097.15; Description=Zinc finger, C3HC4 type (RING finger)
  Pfam module annotation: Pfam domain module=PHD::zf-C3HC4; Domain location=259-300::260-297
MVYLSTSKICFVLLLNTGLVAMCVAWQLARRLFLGSLREAEVERLNEQSWREVIEILFAVTIFRQDFSVSFLAMVAALLLVKALHWLAQKRVEYIETTPSVPLLSHIRIVSFMVFLLTVDCLFLSNSLRSLIQKREASVAIFFSFEYTILATSTLSTFVKYIFYVSDMLMEGQWERKAVYTFYLELISDLVHLSLYMLFFIAIFLNYGVPLHLIRELYETFRSFRIRIADYIRYRKITSNMNERFPEATSEELDASDATCIICREEMTTAKKLLCGHLFHVHCLRSWLERQHTCPTCRAPIVPADNGRAASSRQHGAQAGVQPGTATPSSEGAPGENMSRRQAKLEAAAAAASLYGRSFVYPPANTLNRSGSPQPTSSAPQSEASSSNHQSQKDQETQLQNSSDGLVPLPFSADGVVGSGTSTRDLENSLQKAQENFIKSQIEMLQIQLQMVQRGAAGLSSSENTEHTED

SEQ ID NO: 81486 - protein, 75 aa, Zea mays
  Coding DNA Sequence Number=SeqID_39707
MQSRNSSDGLVPLPLNADGAVGSGTSTRDLENSLQKAQENFIKSQIEENEFVALCVMFLIPSDYNVSCRLQVHEL

SEQ ID NO: 81487 - protein, 60 aa, Zea mays
  Coding DNA Sequence Number=SeqID_39708
MDVLMIRNLGEDQQGLGKGLGVEEEQQGRNNRKEIKSDSAATPSRAGISPRGEVNRAVHG

SEQ ID NO: 81488 - protein, 60 aa, Zea mays
  Coding DNA Sequence Number=SeqID_39709
MDVLMIRNLGEDQQGLGKGLGVEEEQQGRHNRKEIKSDSAATPSRAGISPRSEVNRAVHG

SEQ ID NO: 81489 - protein, 44 aa, Zea mays
  Coding DNA Sequence Number=SeqID_39710
MARQRSAMYVGRIHGTALDGPAAIRGCLRLRASGTIPAVGFWEI

SEQ ID NO: 81490 - protein, 205 aa, Zea mays
  Coding DNA Sequence Number=SeqID_39711
MTFSSTASGLPGCWTGHGPRTWQGNVSVCILQWPMDGCCCVPLQAGAGVALNHRNRFNGHTSSSLEGRSAPAADCEIVIASGQWGKQRQAADKLRNSYTGSNLMKKEKGFPIPRGRGVHTKRRHPRIAAGPSKAVPWMRPTYIADRCRAIFFPAWQNLPVSGVVDDAHVMCRASLFIRRILTACARQCSVAKWRRQRQMTGMSVY

SEQ ID NO: 81491 - protein, 62 aa, Zea mays
  Coding DNA Sequence Number=SeqID_39712
MTRAGISRVDDVEVAKSAGSTRCTSAVGTKGTKRRLSYEERRKRTGIWDDMEAGCRAPFIGP

SEQ ID NO: 81492 - protein, 172 aa, Zea mays
  Coding DNA Sequence Number=SeqID_39713
MRGATPSDRRRETHIDEGTTSPVVAADSVRGTREGCCMRNQGRSIDRFGSHVPAEHVISVTNSSSTVRTGGWELGPGLDSLGLEQQDQPMDQLGRRGQQITSSRVKTLPKNLIRPLPVQDLEDEGFRRPALLIAHAPLRSGRRELKGGSAMKRGESELGSGMIWRLAAGLLL

SEQ ID NO: 81493 - protein, 115 aa, Zea mays
  Coding DNA Sequence Number=SeqID_39714
MEPTLAPTKPWAEKTAAAMTFVVPIPPQIPKPLDQLGRRGQQITSSRVKTLPKNLIRPLPVQDLEDEGFRRPALLIADAPLRSGRRELKGGSAMKRGESELGSGMIWRLAAGLLL

SEQ ID NO: 81494 - protein, 172 aa, Zea mays
  Coding DNA Sequence Number=SeqID_39715
  Homolog annotation: Hit_ID=Q6QP51; Match level="QueryCoverage=21%, HitCoverage=16%, E-value=1e-07, Identity=75%"; Hit description =Putative growth-regulating factor 1
MATAQEIDPFLKADLPTRTPKRHGQSLHQRAPGFPPYDTGAGSHTSYELTRNAKKANRCTRSMASDTSGRRSERRFTSVMMTASKKGFKAGPSERFDSRPRARRVRDYPGYIRYMAEARATLLRYPRTFPRPAGTICNGIPPEGGIEPSDPIKWVRVQQITCRYFWSVPLGH

SEQ ID NO: 81495 - protein, 276 aa, Zea mays
  Coding DNA Sequence Number=SeqID_39716
  Homolog annotation: Hit_ID=Q6QP51; Match level="QueryCoverage=88%, HitCoverage=78%, E-value=3e-10, Identity=34%"; Hit description =Putative growth-regulating factor 1
MMTASKKAGPSEGFDSCPRARRVTDDSGYVCYMAEARATLPRSGSGKSPAGTFGACLWATSRPLSNEAQASTRITQTDGHDSGQGFVYPRGVISPRPSPASGENCSHGRSYVLPEGLLRQWAHPRHARGPTRAGFVEKQPWPNRLSNRPYRRHIQCEDRLTPYPDTRASVVKVEEAPPRPTLGLGLGRRSPPRPTPGLSLNISLGRWSPPHPTLGLGLNLGLGRNHVLARPQPRPQEKLRGNKTGVPSDSPRLKHFSDGHVIAYAGLKHLSDSHVG

SEQ ID NO: 81496 - protein, 187 aa, Zea mays
  Coding DNA Sequence Number=SeqID_39717
  Gene Ontology: Mol. function=helicase activity
  Homolog annotation: Hit_ID=Q1EPC6; Match level="QueryCoverage=80%, HitCoverage=10%, E-value=2e-37, Identity=53%"; Hit description=DNA helicase homolog, putative
MRSFGTVHPSPRPRFPYRVQLHSEAEGPCECIILGKHVSCVFEDLRKMKAPNIAVGLPFTVNGKGHPLPLIIDAYDNAIGTAREVYEEESIEPVTGDVALEDSLNEEQRATYDKIPSAVDTNQGRLFFVDGLGGTEKNYLYRVLLVTLRSQGKIAVATTTPDIAASIMPRGRTAHSRFKIPLTIDDG

SEQ ID NO: 81497 - protein, 171 aa, Zea mays
  Coding DNA Sequence Number=SeqID_39718
  Gene Ontology: Mol. function=helicase activity; Biological process =protein amino acid phosphorylation
  Homolog annotation: Hit_ID=Q1EPC6; Match level="QueryCoverage=72%, HitCoverage=7%, E-value=1e-36, Identity=63%"; Hit description=DNA helicase homolog, putative
MAQGRSYAQGSFGMIAEKETDLKMKRLFRPRWIAIELVANEHATVNGKGHPLPLIIDAYDNAIGTAREVYEEESIEPVTGDVALEDSLNEEQRATYDKIPSAVDTNQGRLFFVDGLGGTEKNYLYRVLLVTLRSQGKIAVATTTPDIAASIMPRGRTAHSRFKIPLTIDDG

SEQ ID NO: 81498 - protein, 232 aa, Zea mays
  Coding DNA Sequence Number=SeqID_39719
  Homolog annotation: Hit_ID=Q6QP51; Match level="QueryCoverage=18%, HitCoverage=19%, E-value=3e-10, Identity=71%"; Hit description =Putative growth-regulating factor 1
MVTTRWENGGSNSPSFRRITRIKRLAGTPNPRSWKETKLTMYPGGTGKGDTLKKDPSREGIRLRISLLISGSKAGPSEGFNSRLRARGLHTQYWSEVRRPDPRKGSTAASGYSGSAPTTDQGFERLAPEGFTAASDTERGMTMAQGAGDTNFLGSSTNLETPKQPLTVNEHEVPRVTNPHTVKFATSSRTREWENRDEIDSEFDRVHLTPRVLQMIEGDAIAGVKGEMNALV

SEQ ID NO: 81499 - protein, 99 aa, Zea mays
  Coding DNA Sequence Number=SeqID_39720
MSDLGMSTTSDVTKCKECGVLTSENNSINKTADEQTFKTQKDAPPNQQTTLSSHQVQETKRETWKSQEITSEKLAINVDVKVITSVTVLRRVHYRSPPR

SEQ ID NO: 81500 - protein, 345 aa, Zea mays
  Coding DNA Sequence Number=SeqID_39721
  Pfam annotation: Domain name=zf-CCHC; Domain location=170-187; Score =27.3; E_value=3.1e-05; Accession=PF00098.13; Description=Zinc knuckle
  Pfam annotation: Domain name=zf-CCHC; Domain location=285-302; Score =28.5; E_value=1.9e-05; Accession=PF00098.13; Description=Zinc knuckle
  Pfam module annotation: Pfam domain module=zf-CCHC::zf-CCHC; Domain location=170-187::285-302
MSDLGMSTASDVTKCKECGVLASQNNTINETADEQTFKTQKDEQPNQQTSDLGTCCCCEYYGIPCRQISTNESETTKQKNRILFSGIKRQMSPQEQVIAESLIPNALSVDELQSIPKRKHHKDAQPQEEIHECYIDGWTITCTQFQPRRRIRSKKLKGKHGKSQEITSRKACYQCGREGHYFRNCPEKSSLQITSEMKLPQFSDTEYEQKCIETSINIVKNNKRYRKTFGYMSSPPQPQAKAPKHMDTQTEESSQTQLYEIQTLNQPSPPVGQAKLTRKELKARGACYYCKNEGHLIRECPKKRLDRIKKKAAKHDLSNTLEDPPFYKYDDEGRLIREQRSKKVP

SEQ ID NO: 81501 - protein, 45 aa, Zea mays
  Coding DNA Sequence Number=SeqID_39722
MTAIGELGTTDRVFIPTAKPILAADSRAVEAICELIVSFILFPIF

SEQ ID NO: 81502 - protein, 175 aa, Zea mays
  Coding DNA Sequence Number=SeqID_39723
MAAIGELGTTDRVFIPTAKPILAADSRAVEAVCELIARALDLFCHAILRRGFERERGGGCQRGRDCSSLPSVVRWGPGKGRHDERTGLPRRVQKTNWAAAERISSCLRSATTTVDSRYPFAVASSQKKPWKNCESTRSSHNSTLCLRNTCVEAPGLSGNDVLGPEHLGNSEIIKN

SEQ ID NO: 81503 - protein, 199 aa, Zea mays
  Coding DNA Sequence Number=SeqID_39724
  Subcellular localization annotation: CTP_CleavageSite=36; ConfidenceScore=5.06e-01
MAVMGSTSENMYLCQVRKQQIFVAFVPRWCLRKKVKTEASGGNMPPRTRKTTRKSTGPLGVPRHQLALRHEDSSSGSNDPIGDLEAQVEQLRTELRHRNSVWVEDGQRINELRTDIRHLQDELAERDLALDWAVNSRSIAWDREAKARAHPVGMGARPSGTAGEAFGGELDLFKPPTSMNLADEWTPTPDNEAAKDNKY

SEQ ID NO: 81504 - protein, 143 aa, Zea mays
  Coding DNA Sequence Number=SeqID_39725
MSLPNEIWHSIGPSTHVPLLGTQRPKLEPTLSEWEQGLLEQQMPSRTRAHDGARTSRGQDDTPNPPPVPPTLAEAIAALVTATADNTRFLREMAGQQLQQQGGRAYPQGPRETSYLDFSETCPPLFVKAEDPLEADKWIWVIE

SEQ ID NO: 81505 - protein, 103 aa, Zea mays
  Coding DNA Sequence Number=SeqID_39726
MEKELLRHQPLAMDGAQMGEEEVGRRCSAGTGGHGRNSSSLPWGMLQRVEEEGAGGAMAGRGVEAVGHGRQRAEGMHTKEEEGWRGEKKTGRLWRLGRSEGWE

SEQ ID NO: 81506 - protein, 103 aa, Zea mays
  Coding DNA Sequence Number=SeqID_39727
MEKELLRHRPLAMDGARMGEEEVGQRCSAGTGGHGRNSSSLPWGMLQRIEEEGAGGAMAGRGVEAVGHGRQRAEGMHAKEEEGWRGEKKTGRLWRLGRSEGWE

SEQ ID NO: 81507 - protein, 258 aa, Zea mays
  Coding DNA Sequence Number=SeqID_39728
MPPAPPQGILAAGADRDGDGDDDAGGSSSHGTELSEEPEPDGWIARPITRDAARGCHFHDALDTLLRRAFDRHTWSIEYRCVVYQHRRVLYPDQWEATCLVRRPDDDLRGAEAFLEHYSITKRDTAEAAMQDVARQALSQYCSLFSGVADGLDLKYYPRRSTNSAGGVIVSPVGEGNPRLSNMVNLVVVLNTELDHALDDLGKVRAEVAELCAECATRHYLDCGSPALVGIQHPYRSPPHGRFDYGTPDCRTRIDLDP

SEQ ID NO: 81508 - protein, 258 aa, Zea mays
  Coding DNA Sequence Number=SeqID_39729
MPPAPPQGILAAGADRDGDGDDDAGGSSSHGMELSEEPEPDGWIARPITRDAARGCHFHDALDTLLRRAFDRHTWSIEYRCVVYQHRRVLYPDQWEATCLVRRPDDDLRGAEAFLEHYSITKRDTAEAAMQDVARQALSQYCSLFSGVADGLDLKYYPRRSTNSAGGVIVSPVGEGNPRLSNMVNLVVVLNTELDHALDDLGKVRAEVAELCAESATRHYLDCGSPALVGIQHPYRSPPRGRFDYGTPDCRTRIDLDP

SEQ ID NO: 81509 - protein, 258 aa, Zea mays
  Coding DNA Sequence Number=SeqID_39730
MPPAPPQGILAAGVDRDGDGDDDAGGSSSHGTELSEEPEPDGWIARPITRDAARGCHFHDALDTLLRRAFDRHTWSIEYRCVVYQHRRVLYPDQWEATCLVRRPDDDLRGAEAFLEHYSITKRDTAEAAMQDVARQALSQYCSLFSGVADGLDLKYYPRRSTNSAGGVIVSPVGEGNPRLSNMVNLVVVLNTELDHALDDLGKVRAEVAELCAECATRHYLDCGSPALVGIQHPYRSPPRGRFDYGTPDCRTRIDLDP

SEQ ID NO: 81510 - protein, 220 aa, Zea mays
  Coding DNA Sequence Number=SeqID_39731
MPPAPPQGILAAGVDRDGDGDDDAGGSSSHGTELSEEPEPDGWIARPITRDAARGCHFHDALDTLLRRAFDRHTWSIEYRCVVYQHRRVLYPDQWEATCLVRRPDDDLRGAEAFLEHYSITKRDTAEAAMQDVARQALSQYCSLFSGVADGLDLKYYPRRSTNSAGGVIVSPVGEGNPRLSNMVNLVVVLNTELDHALDDLGKVRAEVADCVLNARHATI

SEQ ID NO: 81511 - protein, 549 aa, Zea mays
  Coding DNA Sequence Number=SeqID_39732
  Gene Ontology: Mol. function=ubiquitin-protein ligase activity; Cellular component=ubiquitin ligase complex; Biological process =protein ubiquitination
  Homolog annotation: Hit_ID=Q6ETF7; Match level="QueryCoverage=77%, HitCoverage=87%, E-value=1e-121, Identity=58%"; Hit description =Putative photoperiod responsive protein
  Pfam annotation: Domain name=P19Arf_N; Domain location=327-371; Score= 3.4; E_value=0.088; Accession=PF07392.3; Description=Cyclin-dependent kinase inhibitor 2a
  Pfam annotation: Domain name=U-box; Domain location=135-209; Score =60.3; E_value=6.4e-15; Accession=PF04564.6; Description=U-box domain
  Pfam module annotation: Pfam domain module=P19Arf_N::U-box; Domain location=327-371::135-209
MDMQFTFVGAGLPGSCHGMAVLRSCMEEANYPHPPAGSYLVAFRRRTRCIRVVARYAEREGKVRPSVLRVAKPPTTKQGEYPPPRVVRSPAPAAGCRLPAGVAVAYARSSRRSCGRVTRKMNGRLSAEYRGLEVKVPNLFRCPISLDVMHSPVSLCTGVTYERASIQRWLDSGNTTCPATMLTLPSTDLVPNLTLRRLIALWASTAAPSSSSPAASAVGPTPAAAAAELLRRIADPGADPCPPLRKLAAFLSDDDVDEFDKNALARAGGAAETVAFVLRRADREAAEAAVRVLAAIAASDCIEEESKRRVAAALAADAPSAAASLARVLRSGTSLEARVDAARLVESLLRNAAPGARAAVAESEDLVRELVRLVGPADEKKGSLDGQAVAAGMSCLAAVAATRRARAAMVRLGAVAAAVRVLEADAGPPGQALRVLEATVGCAEGRAAVCESALSVVPAVVSKMMKAGVGGAEAAVSVLWAVCHRYRDRRAVEAAAACEGGLTKLLLLMQSGCSAAARQMASELLKIFRVNGKSCVAGYDSKTSHIMPF

SEQ ID NO: 81512 - protein, 433 aa, Zea mays
  Coding DNA Sequence Number=SeqID_39733
  Gene Ontology: Mol. function=ubiquitin-protein ligase activity; Cellular component=ubiquitin ligase complex; Biological process =protein ubiquitination
  Homolog annotation: Hit_ID=Q6ETF7; Match level="QueryCoverage=98%, HitCoverage=87%, E-value=1e-121, Identity=58%"; Hit description =Putative photoperiod responsive protein
  Pfam annotation: Domain name=P19Arf_N; Domain location=211-255; Score= 3.4; E_value=0.088; Accession=PF07392.3; Description=Cyclin-dependent kinase inhibitor 2a
  Pfam annotation: Domain name=U-box; Domain location=19-93; Score =60.3; E_value=6.4e-15; Accession=PF04564.6; Description=U-box domain
  Pfam module annotation: Pfam domain module=P19Arf_N::U-box; Domain location=211-255::19-93
GRLQMNGRLSAEYRGLEVKVPNLFRCPISLDVMHSPVSLCTGVTYERASIQRWLDSGNTTCPATMLTLPSTDLVPNLTLRRLIALWASTAAPSSSSPAASAVGPTPAAAAAELLRRIADPGADPCPPLRKLAAFLSDDDVDEFDKNALARAGGAAETVAFVLRRADREAAEAAVRVLAAIAASDCIEEESKRRVAAALAADAPSAAASLARVLRSGTSLEARVDAARLVESLLRNAAPGARAAVAESEDLVRELVRLVGPADEKKGSLDGQAVAAGMSCLAAVAATRRARAAMVRLGAVAAAVRVLEADAGPPGQALRVLEATVGCAEGRAAVCESALSVVPAVVSKMMKAGVGGAEAAVSVLWAVCHRYRDRRAVEAAAACEGGLTKLLLLMQSGCSAAARQMASELLKIFRVNGKSCVAGYDSKTSHIMPF

SEQ ID NO: 81513 - protein, 215 aa, Zea mays
  Coding DNA Sequence Number=SeqID_39734
  Gene Ontology: Mol. function=protein heterodimerization activity; Cellular component=microtubule; Biological process=cell division
  Homolog annotation: Hit_ID=Q337H9; Match level="QueryCoverage=72%, HitCoverage=18%, E-value=2e-65, Identity=81%"; Hit description =Katanin p80 WD40-containing subunit B1, putative, expressed
  Pfam annotation: Domain name=DUF1084; Domain location=76-214; Score= -130.7; E_value=0.011; Accession=PF06454.2; Description=Protein of unknown function (DUF1084)
  Pfam annotation: Domain name=WD40; Domain location=123-159; Score =33.3; E_value=8.3e-07; Accession=PF00400.22; Description=WD domain, G-beta repeat
  Pfam annotation: Domain name=WD40; Domain location=39-77; Score=20.6; E_value=0.0056; Accession=PF00400.22; Description=WD domain, G-beta repeat
  Pfam annotation: Domain name=WD40; Domain location=81-119; Score =42.9; E_value=1.1e-09; Accession=PF00400.22; Description=WD domain, G-beta repeat
  Pfam module annotation: Pfam domain module=DUF1084::WD40::WD40::WD40; Domain location=76-214::123-159::39-77::81-119
MTRGVCRAHFECQLCQVWEASIKDPHHWWGGFEGQSLGYRETRCPPGFTSPVESVSFDSSKVTIGAGAASGTIKIWNIEEAKVVRTFTGHKSSCASLDFHPFGEFLAIGSSDTNMKIWDTRQQRCIHTYKGHTQRINVLKFTPDGRWIVSGGADNLVKDMPGLAFFTTYALLVLFWAKIYYQARAMSTDWLRPTFYWINGVVYAIQVKIEDIYQQ

SEQ ID NO: 81514 - protein, 215 aa, Zea mays
  Coding DNA Sequence Number=SeqID_39735
  Gene Ontology: Mol. function=protein heterodimerization activity; Cellular component=microtubule; Biological process=cell division
  Homolog annotation: Hit_ID=Q337H9; Match level="QueryCoverage=72%, HitCoverage=18%, E-value=2e-65, Identity=82%"; Hit description =Katanin p80 WD40-containing subunit B1, putative, expressed
  Pfam annotation: Domain name=DUF1084; Domain location=76-214; Score= -130.7; E_value=0.011; Accession=PF06454.2; Description=Protein of unknown function (DUF1084)
  Pfam annotation: Domain name=WD40; Domain location=123-159; Score =33.3; E_value=8.3e-07; Accession=PF00400.22; Description=WD domain, G-beta repeat
  Pfam annotation: Domain name=WD40; Domain location=39-77; Score=20.6; E_value=0.0056; Accession=PF00400.22; Description=WD domain, G-beta repeat
  Pfam annotation: Domain name=WD40; Domain location=81-119; Score =42.9; E_value=1.1e-09; Accession=PF00400.22; Description=WD domain, G-beta repeat
  Pfam module annotation: Pfam domain module=DUF1084::WD40::WD40::WD40; Domain location=76-214::123-159::39-77::81-119
MTRGVCRAHFECQLCQVWEASIKDPHHWWGGFEGQSLGYRETRCPPGFTSPVESVSFDSSEVTIGAGAASGTIKIWNIEEAKVVRTFTGHKSSCASLDFHPFGEFLAIGSSDTNMKIWDTRQQRCIHTYKGHTQRINVLKFTPDGRWIVSGGADNLVKDMPGLAFFTTYALLVLFWAKIYYQARAMSTDWLRPTFYWINGVVYAIQVKIEDIYQQ

SEQ ID NO: 81515 - protein, 171 aa, Zea mays
  Coding DNA Sequence Number=SeqID_39736
  Subcellular localization annotation: CTP_CleavageSite=33; ConfidenceScore=5.11e-01
MDKDRQDATRKRRTFTRVGDPSREVKRAWGGMKSTAPSSSRPPPAAKLAVPGPSKSSSGARAVTFGSGKPPSAEPTKERRPPSPAAAFADHVASGALTSEFAAERQRLEGRIECLRAQHTEAARDKSATENKSRRLTKKLAAAEAEKEDLRRQLAAERKDVNRACADAQAT

SEQ ID NO: 81516 - protein, 133 aa, Zea mays
  Coding DNA Sequence Number=SeqID_39737
MAGSVAQQLKHATQQLKHAAAFADHVALGALTSEFAAERQRLEGRIECLRTQHTEGCAGQMVRDEEAKDLGDLESTLPEASGTKEEAEGELAPPSDGGEGPVVTPTPTYAGEDPVPAIAPTGSDVWAYADNRC

SEQ ID NO: 81517 - protein, 136 aa, Zea mays
  Coding DNA Sequence Number=SeqID_39738
  Homolog annotation: Hit_ID=Q9LU56; Match level="QueryCoverage=40%, HitCoverage=15%, E-value=5e-16, Identity=67%"; Hit description =Arabidopsis thaliana genomic DNA, chromosome 5, P1 clone:MWD22
MKSPEKLINFTEKLINFTENPGENSAAVGYLIFDTNGGLNQMRMVVPLLFGSVAMEKVACHIVHWIFRRTGRHIFLTDDDEGQPPLLQRMVEDHDDLYFISWKIKPHQVIISRNDVSESQFNLVLNIELQQIIDSY

SEQ ID NO: 81518 - protein, 182 aa, Zea mays
  Coding DNA Sequence Number=SeqID_39739
  Homolog annotation: Hit_ID=Q8H0H5; Match level="QueryCoverage=31%, HitCoverage=8%, E-value=6e-23, Identity=93%"; Hit description =Hypothetical protein A20
MEQCVARLDVAMFNAILRESASEIPTDPISDPIVDPKVLPIPAGDLSFGSGAQLKNSLQPTMTGALARTAIRLTIVDKVQSEVNASEVHERVPLLFGSVAMEKVACHIVHWIFRRTVRHIFLTDDDEGQPPLLQRMVEDHDDLYFISWKIKPHQVIISRNDVSESQFNLVLNIELQQIIDSD

SEQ ID NO: 81519 - protein, 210 aa, Zea mays
  Coding DNA Sequence Number=SeqID_39740
MAHKSAQLLPVWHTRREAGQWGPVVSGERVRGELGPHECKGLLLGFWPPEAEAGTKRSAFGADSGRRASIPVSRRRSVFGSKIQWKQADSIADKAIGRMQEISDKIFSVARETIHPRRGLTSFDATKLRVALEEITCMLEQDSLVLQEHLDIVNNFNIPVDSSYEPSTLSSPPPSDDDLTPHWDFAEHFQNFWGVEYDSDQMPSFSDNDV

SEQ ID NO: 81520 - protein, 136 aa, Zea mays
  Coding DNA Sequence Number=SeqID_39741
MEEFANGGRPYLRRRRRWRVGCAAAARWVRCGGACFGEYPNPTRSGQTSIRSQVKAASSGACAGGFLPKRVGQNPRQKLSVWFQLLLLAARSRAEAEPNRGYGHMLSLLQGGEGDPVCAGPLIRGSAHAQEMGQEC

SEQ ID NO: 81521 - protein, 128 aa, Zea mays
  Coding DNA Sequence Number=SeqID_39742
MGRKRRACRRLERREKQHPRDTLGSTGKRRAIPFLSPPGEWTVQSPYALISAACVVSACSGSFTGNVRVVVGIVYAAARAYCLPTEWTGTPPAGWPGRRLQDGLVAARQRSGQVTFNAEAAHRLPVEW

SEQ ID NO: 81522 - protein, 525 aa, Zea mays
  Coding DNA Sequence Number=SeqID_39743
MSIVYAAARTYCLPMEWTGTLPAGWPGRHPLRPLAYVTGGRPRGSIGAPPERGAEAYTVWSGHVSAPDPRLALIKARVFLAPESWDPAMGGLDPTQRGPEPILGVRFAPVEVLDLAWRSSLYMQGSGTFPWGSGPTVDTLEDIVFSGHMASLEPSTWRGRVLFTTRLEIAARAPRLHTVVRGTPVSGYRHSQSPYPLCWRGGLPSSTSTAADAVSASVALRASSTRASISASMYPCSSSASLSTSSRSSTCRFRSCSMMSLFGFRIPPGAEGEQEEGEGQGLARNLLAWTCPVVPDPRGVYSPILLYMPESVGRAVGPAVKTSWLRNPSSGFGSASNESSDRARAHPSCLFEWPPQLGPPENPVSLGRLRLWAYRRRLRSAHLPFASFSSTIKWVVPRWLARHCPFGHLYLRTVTVILASVATTSFTILLLFSLPSCLHLRTTPFSVEDVGACASSPYSFDTSPDTDSRSSYCMSTRTFHIMRAPSFSPSSDILFVFPAFVLFFLPNLLPQPTVVATSDRRSSTR

SEQ ID NO: 81523 - protein, 74 aa, Zea mays
  Coding DNA Sequence Number=SeqID_39744
MGDHVSGRVRGKVYCQVQSGIRTLILISFSSRRPRVPMDPCPQTITILLSKWIQPIPDLARVLEKSLDFYRDPN

SEQ ID NO: 81524 - protein, 119 aa, Zea mays
  Coding DNA Sequence Number=SeqID_39745
MGLWRNRPNYSQLKCPNRTFKGSNTLKPGITRQSLGSSPIKPLIQDRIPLAHSKYNGSSSLISCEKQTIRIEFLSLQVTALVPTITGMGDHVSGRVRGKVHCQVQSGIRTLILIPIFIS

SEQ ID NO: 81525 - protein, 85 aa, Zea mays
  Coding DNA Sequence Number=SeqID_39746
MASKKVTSKATTSIDDATKAALLAKKKGKASLVGDVPHEAIEDGQSTASDIAKRTRLPHVAEPPELFQLKCPSRTLKDSNTLKPK

SEQ ID NO: 81526 - protein, 177 aa, Zea mays
  Coding DNA Sequence Number=SeqID_39747
  Gene Ontology: Mol. function=DNA binding
  Subcellular localization annotation: CTP_CleavageSite=36; ConfidenceScore=5.30e-01
MEEEAASSTSRAFNRPTPGAAVVHSARQHTPTQASRASRATPRALSAARELLCHPPSSTALPGTMKQWCDDVDRLLDMAHSGSTRSRPRSSRRQHEASASVRSPSVRAAPTEDLRAELNRRRAGEDAPVSVERSSDLRVELNRRRAGEDARAAEPPELFQLKCPSRTLKGSNTLKSE

SEQ ID NO: 81527 - protein, 247 aa, Zea mays
  Coding DNA Sequence Number=SeqID_39748
  Gene Ontology: Mol. function=structural constituent of ribosome; Cellular component=intracellular; Biological process=translation
  Homolog annotation: Hit_ID=Q96S84; Match level="QueryCoverage=81%, HitCoverage=98%, E-value=2e-96, Identity=84%"; Hit description =Ribosomal protein L15
  Pfam annotation: Domain name=Ribosomal_L15e; Domain location=45-236; Score=476.7; E_value=2.8e-140; Accession=PF00827.8; Description =Ribosomal L15
MARGRVRPAAKVEAMGGHGGAIVVVGGREASIAAGAGPQGASSAGAYKYVSELWRRKQSDVMRFVQRVRCWEYRQQPAIVRLTRPTRPDKARRLGFKAKQGYVVYRVRVRRGGRKRPVPKGIVYGKPKHQGITQLKFQRNKRSVAEERAGRKLGGLRVLNSYWVNEDSTYKYFEIILVDVAHTAIRNDPRINWLCNPVHKHRELRGLTSAGKKFRGLRGKGHTHHKNRPSRRATWKRNQTLSLRRYR

SEQ ID NO: 81528 - protein, 74 aa, Zea mays
  Coding DNA Sequence Number=SeqID_39749
MARGRVRPAAEVEAMGGHGGAVVVVGAARRWVGNAAERGTCGEVFRKPIPARKEKGTYMVELKSLFFFQRKAIL

SEQ ID NO: 81529 - protein, 302 aa, Zea mays
  Coding DNA Sequence Number=SeqID_39750
  Subcellular localization annotation: CTP_CleavageSite=82; ConfidenceScore=5.33e-01
MRKRRAFTRVGDPSHEVKRVRGSAKPAAPDSSKPPPAMKPAVPRPSKSSSGARAVASGSSKPPSAEPMKEQGPPSPLRTTVEAAGGADLTMDICVDDYRATAFANHVVSGALTLEFAAERQRLEGKIECLRAQHTEVVRDKSAAENKSRRLMEKLAAAEAEKEDLSRHLAAERKDANRACAEAQAAQTEAKLARAEASLARQCAEEVETSHSCLHNRLDKAEASTRTEVDQTHAQLVDVYRELGARTAPFDASGKEVGLRFLRWLQEELEVLPTIVTGLMSFASLITCEGAVNALSSGLRSL

SEQ ID NO: 81530 - protein, 340 aa, Zea mays
  Coding DNA Sequence Number=SeqID_39751
METSLCGLRDRLDKAEASTCAEEELEVLRTIVTGLMSFASLITCEGAVNALSHEGCGHFEVFDRSDEEFERGIFRVEDLVLKRSAGALYDRMWGPHGRETVWERSDRAMEQMAHDEEVEDLRDLDSTLPEASGVELAPPSDAGEGPLVTFVPTSAGEDPVPAAAPTGGDTSIVAGEPATEDPAVSAGPSQVPMYGPAQATAADNTNFVAAATVVPANDNLSGSGSECFESDGEFGSSFSWIEESSDEGLDYFAALDVAAVESPPRVEVGEVADLPNARTECRRQRVVSKHSVGEVSRSGRRRRMGMERDRLRVDRFGKRELLSSSFGTSIGEGDLWNLFE

SEQ ID NO: 81531 - protein, 257 aa, Zea mays
  Coding DNA Sequence Number=SeqID_39752
  Subcellular localization annotation: CTP_CleavageSite=33; ConfidenceScore=5.21e-01
MELATTPAVLPTCARPSTRACHRLALALACLLVVTAARSLFVHRVSRMLAFALSRRTHHPLLDCQANPLIRVLLAVNSRLTSSFSLVHISTDSVSSRVCVIELVVDFISRRLILELDEKVRQVRLASARGSTKCLNWTTVIVLAVIESIRFWIYEEGLKEHRKRAKLTSRWCKEWSSSHDNFVSRTNLKKWMGIFTKENTYDGESVKGLNEFNIRKDVPLPGYNFVLVLMVLSAGGLSLLISLRNFSILLIEDGHLS

SEQ ID NO: 81532 - protein, 257 aa, Zea mays
  Coding DNA Sequence Number=SeqID_39753
  Subcellular localization annotation: CTP_CleavageSite=49; ConfidenceScore=5.21e-01
MELATTPAVLPTCARPSTRACHRLALALACLLVVTAARSLFVHRVSRVLAFALSRRTHHPLLDCQANPLIRVLLAVNSRLTSSFSLVHISTDSVSSRVCVIELVVDFISRRRILDLDEKVRQVRLASARGSTKCLNWTTVIVLAVIESIRFWIYEEGLKEHRKRAKLTSRWCKEWSSSHDNFVSRTNLKKWMGIFTKENTYDGESVKGLNEFNIRKDVPLPGYNFVLVLMMLSAGGLSLLISLRNFSILLIEDGHLS

SEQ ID NO: 81533 - protein, 812 aa, Zea mays
  Coding DNA Sequence Number=SeqID_39754
  Gene Ontology: Mol. function=cysteine-type peptidase activity; Biological process=proteolysis
  Homolog annotation: Hit_ID=Q53MK8; Match level="QueryCoverage=31%, HitCoverage=27%, E-value=6e-23, Identity=27%"; Hit description=Ulp1 protease family, C-terminal catalytic domain, putative
MKSVDRPPANPKRITIESSQEFFSVEIPRPASIGVPPNTKHSDQCPAPVEKPSVIYEANEQTGSGNDDDDFMTPTKKRNAAGSHMNILRKTCTKRPKVLETPRQKLNVRCNPQDVIITIKILNERQRQAVARKGFSNILDMTLDALGSRSHLRWLMDKLDHKDMTIRPGVGKELKITKETVHLILGLPNAGGGKPLGIDEAVAGNNLRADLGLSKDEFVVASLQDRLRKGNDDDLSIRCFFLILFNRLLFPTSSWGISNHEVLLTEEMDRFHEIDWCHLIFNDLCEAAQKWHTRSTSNVSTTIYGCSVVILFRSFSETCYSAVPSVQFQSEHRDRTNIFDVPRPDPCGHHTIHIQLPLIKDMLSSKIKQLQPRDRPKFIEKFVEYDSEVGKACSVIKSTLTKMVVKQYELADTFAELIDDVLRAESGDPDNVAEAPQTDKPPDISQHMSSEEQTHEGTQNTQDMTMPSQPNTELTGTQFEEIHEKQQQMRRAFEGCPDDLETNITPNAENQGGDIGPSHDTPTFTGPLFDQTPSGHVADGEETHSLHSTHDHSVPRLTELDCARSLRDFLCSSKADPKQCFIMGFRHDKNNNCSSINKDRLVLDVNVGILLNFEEHERYSKSPQIFDQTVLDAYLDKTLPQLDNFGDYKAIMVPILHMGHWTLYVINIQLRCIHILDSNPYGPELGGTSWKMFHYSLKDIGTRKLPWARVIMNRLNKSLQQVRPNSRIPKFGNFPIDMPPMCPTMIAGSNDCGFFVMRYIQYYDHTDGSIKQFIKRENSGDLRSLALHYLTFHSKNKCLPLPLEIQRFKFGR

SEQ ID NO: 81534 - protein, 56 aa, Zea mays
  Coding DNA Sequence Number=SeqID_39755
MGGGLLAAASSPRSALPLLGPSEQKASSSPLLEQLSGPEHVCNFGTEPCFFLIFEH

SEQ ID NO: 81535 - protein, 331 aa, Zea mays
  Coding DNA Sequence Number=SeqID_39756
MLETRGKKTQLRKRDEGVFPGLGGRRRHTRQDGLILQARVFTLKGAVAPSASTTSSAKSDPASDGDAVQGLLRESGPSRRLGRAAEGSLQLSQRSPRQQGRTGRGIPTPPGYGYLTRHLDTGRLMLGKAVQIINGRDLVLENEEKTRLRAEITYMFRPRQPQGTENTGIRSATTNRTPVPPPQVRTTPLRGGRPAEQREADGWRAVTCSSSGDYDDFCSEGPSSDNADLRLDAAARRPPPMPKLVRQGRAEGRRVGGTGKGGYPERDPSPRRNRAPSPPLLIRGSKAGPPKGSTVASDRVGPTPTTGQGFEGQPPEGFHGRLRLLGLRAHY

SEQ ID NO: 81536 - protein, 234 aa, Zea mays
  Coding DNA Sequence Number=SeqID_39757
  Gene Ontology: Mol. function=acetylglucosaminyltransferase activity; Cellular component=membrane; Biological process=isopeptide cross -linking via N6-(L-isoglutamyl)-L-lysine
  Homolog annotation: Hit_ID=Q6YYY9; Match level="QueryCoverage=57%, HitCoverage=29%, E-value=1e-34, Identity=50%"; Hit description=N -acetylglucosaminyltransferase-like protein
MTWAGSSSVILSRKFIEYCIVGMDNLPRTLLMYYTNMPLPHRKYFQTVLCNSAEFNKTVVNHDLHYSTWDARSKNEPRLLTIDDVENMTESGAAFGTRFPKDDHALDRIDEEILHRHPGELVTGGWCIGVGHDSPCDISVQVDHKKCSTISSCGSIAFAIKDSRGAVTTVGAVAVALVGTPDSPVNYSGVALQKPEAEQFRVDLPGAPDTVRWHTGQSGAPDQGSLRLVLLLSF

SEQ ID NO: 81537 - protein, 365 aa, Zea mays
  Coding DNA Sequence Number=SeqID_39758
  Homolog annotation: Hit_ID=Q6YYY9; Match level="QueryCoverage=30%, HitCoverage=28%, E-value=9e-17, Identity=39%"; Hit description=N -acetylglucosaminyltransferase-like protein
MQRLRRRAESGQGRCGRCSDCAGGWSSGRGSATTAQKCEGSTDPRAEIRDGHQRAKSLRCVKSGGSRRLQICDGGAGTQGLPARREQEGADPRAEIRDGHTAARALESSLREVRRTAARAEIRDATAGGGRRRRTGKGRRTTTWAANVDDKMMRQALRLLSFLGNLLNIVLLEVFSDSSFATPLNFNKTVVNLDLHYSTWDARSKNEPRLLTIDDVENMTESGAAFGTRFPKDDHALDRIDEEILHRHPGELVTGGWCIGVGHDSPCDISVQVDHKKCSTISSCGSIAFAIKDSRGAVTTVGAVAVALVGTPDSPVNYSGVALQKPEAEQFRVDLPGAPDTVRWHTGQSGAPDQGSLRLVLLLSF

SEQ ID NO: 81538 - protein, 67 aa, Zea mays
  Coding DNA Sequence Number=SeqID_39759
MAVWYRNKGTSCFSYLGSSVVVLDALIQVEITIAGTQDVIVDITPQPITLNQSSKSDKYHKNKHSSV

SEQ ID NO: 81539 - protein, 123 aa, Zea mays
  Coding DNA Sequence Number=SeqID_39760
MAATAEEERLRHATQRFPESPRQWFWEDRRGGFICPRLIEPVAEKLGHAQVKSAVHGGVFFAVRLSSPASLAGTTGPSNRPHAEVSQVEECPPDVIMDITPQPITLNQRSKSYKYHKNKHSSV

SEQ ID NO: 81540 - protein, 63 aa, Zea mays
  Coding DNA Sequence Number=SeqID_39761
MSACQWGPPSIDRPGSRTGVGGVDGMDGHHEYADVIVDITPQPITLNQRSKSYKYHKNKHSST

SEQ ID NO: 81541 - protein, 96 aa, Zea mays
  Coding DNA Sequence Number=SeqID_39762
MTRNMAMHIYPESGGFGPRLATVDERFAATDPDLFIRQEIRPRPQQRTPKSAPRLSLPESSGEGRRDVIVDITPQPITLNQRSKSDMYHKNKHSSV

SEQ ID NO: 81542 - protein, 245 aa, Zea mays
  Coding DNA Sequence Number=SeqID_39763
  Gene Ontology: Mol. function=catalytic activity; Cellular component =citrate lyase complex; Biological process=metabolic process
  Homolog annotation: Hit_ID=Q9C522; Match level="QueryCoverage=99%, HitCoverage=37%, E-value=1e-108, Identity=85%"; Hit description=ATP citrate lyase, putative; 3734-7120
MELVMLSLFCGSSAAFLAIALSLLSFFNAPQICIMLCADHGPCVSGAHNSIVTARAGKDLVSSLVSGLLTIGPRFGGAIDDAARYFKDACDRGLTPYEFVEGMKKKGIRVPGIGHRQKVHLPVSIRIKSRDNRDKRVQLLQKYAHTHFPSVKYMEYAVQVETYTLSKANNLVMNVDGAIGSLFLDLLSGSGMFTKQEIDEIVEIGYLNGLFVLARSIGLIGHTFDQKRLKQPLYRHPWEDVLYTK

SEQ ID NO: 81543 - protein, 213 aa, Zea mays
  Coding DNA Sequence Number=SeqID_39764
  Gene Ontology: Mol. function=catalytic activity; Cellular component =intracellular; Biological process=metabolic process
  Homolog annotation: Hit_ID=Q42036; Match level="QueryCoverage=33%, HitCoverage=57%, E-value=3e-34, Identity=91%"; Hit description=ATP citrate-lyase
MDDGDAANSGKHVAGQVCQIYGDGVGTAADDDLFTACDVCGFPVCRPCYEYERKDGTQACPQCKTKYKRHKGDEPCYAGVPMSTIIEQGYGVGDVISLLWFKRSLPRYCTQFIEICVMLCADHGPCVSGAHNSIVTARAGKDLVSSLVSVDFSSLWRWKIRLDASVMLSKGNESLLIPDNAQVISSSVVDRCPHRSEIQSVAHAEGEGAVFNI

SEQ ID NO: 81544 - protein, 74 aa, Zea mays
  Coding DNA Sequence Number=SeqID_39765
MGADYSNLSEDHLLFYHQLCQYWKTAGFCPYHKKFSEPDFSVLEDELFVEGGRDVMAGKAYGRRPKQPGEDKLD

SEQ ID NO: 81545 - protein, 174 aa, Zea mays
  Coding DNA Sequence Number=SeqID_39766
MGADYSNLSEDHLLFYHQLCQYWKTAGFCPYHKKFSEPDFSVAPAAAHAHAPPPPRAVQQTHRRLIADDRWAAGPPPCDAPRLNSIVVVPSPSTAMDPLHAVLPDTSAVAPLAAAGADARLAAPHTASLSSPSAAAVLITSDLGLPGYPACTGVLTGLLSPTRLPRLPLPGFLH

SEQ ID NO: 81546 - protein, 588 aa, Zea mays
  Coding DNA Sequence Number=SeqID_39767
  Gene Ontology: Mol. function=heat shock protein binding; Cellular component=membrane; Biological process=protein folding
  Homolog annotation: Hit_ID=Q04960; Match level="QueryCoverage=60%, HitCoverage=97%, E-value=3e-62, Identity=60%"; Hit description=DnaJ protein homolog
  Pfam annotation: Domain name=DnaJ; Domain location=236-325; Score =81.5; E_value=2.7e-21; Accession=PF00226.21; Description=DnaJ domain
  Pfam annotation: Domain name=DnaJ_CXXCXGXG; Domain location=389-475; Score=114.7; E_value=2.7e-31; Accession=PF00684.9; Description=DnaJ central domain (4 repeats)
  Pfam module annotation: Pfam domain module=DnaJ::DnaJ_CXXCXGXG; Domain location=236-325::389-475
MDQSELNHNLVPLEVREEYELRRDLKVRAFKTYHAIPSQANPMESCPSKEVENLREKLVEENFYLITELGEQGRVPVLLLKLDDPVPRRKPAIVFLHNSYKCKEWLHPLLKVFLSLRFDEDIGKDEIEKKRDVSVSEYIQSVTKSESHVIRSTVLYNIKTITTTIHKWQMILLFNEELIKVQMLLTSLHRFWIQDLMLVPQVTHIILLVLIRPCQDMQQAITIIIKTMPEFRWPSRYYEILGVSKDASQDDLKKAYRKAAIKDHPNKGGDPEKCCYDGVLLFPDSVYISFFLIYKSMTMFGYKAFKELAQAYEVPSDPEKREIYDQYGEDALKEGMGGGGGMHDPFDLFQSFFGGGSPFGGGSSRGRTQRWGDDVVHPLKVSLEDLYNGTSKKLSLSHNVLSSKCNGKGSKSGASSRCAGCQCSGFKVQIRQLGPGMIQQMQHPCNECKGSRETISDKDRCPQCKGDKVVPEKKVFEVVVEKDSFKAINDEGMPMYQRPFMKGKLYIHFSVEFSDLLSSEQCKALEVVLPPKPVSQYTDMELDECEDTMPYDVNIEEEMRRRQQQHQEAYDEDDDVPGGGQRVQCAQQ

SEQ ID NO: 81547 - protein, 385 aa, Zea mays
  Coding DNA Sequence Number=SeqID_39768
  Gene Ontology: Mol. function=heat shock protein binding; Cellular component=membrane; Biological process=protein folding
  Homolog annotation: Hit_ID=P42824; Match level="QueryCoverage=86%, HitCoverage=63%, E-value=2e-84, Identity=72%"; Hit description=DnaJ protein homolog 2
  Pfam annotation: Domain name=DnaJ_C; Domain location=132-241; Score= -11.9; E_value=1.7e-05; Accession=PF01556.9; Description=DnaJ C terminal region
  Pfam annotation: Domain name=DnaJ_CXXCXGXG; Domain location=47-119; Score=76.2; E_value=1e-19; Accession=PF00684.9; Description=DnaJ central domain (4 repeats)
  Pfam module annotation: Pfam domain module=DnaJ_C::DnaJ_CXXCXGXG; Domain location=132-241::47-119
MEAIMAGYFKTLFHLNPGGIQPHPPATCDRESLLRPHDTDASASQDQITSHKGSKSGASSRCAGCQCSGFKVQIRQLGPGMIQQMQHPCNECKGSGETISDKDRCPQCKGDKVVSEKKVFEVVVEKGMQNGHKITFPGEADEAPDTATGDIIFVLQQKEHPKFKRKGDDLFYEHTLTLIESLCSFQFVLTHMDNRQMLIKLNHGEVVKPNSFKAINDEGMPMYQRPFIKGKLYIHFSVEFSDYIRWWYGEPRRLGLGIWRARKPVQFDGGSRVYYIQYHNSFKAINDEGMPMYQRPFIKGKLYIHFSVEFSDSLSPEQCKALEVVLPPKPVSQYTDMELDECEDTMPYDVNIEEEMRRRQQQHQEAYDEDDNVPGGGQRVQCAQQ

SEQ ID NO: 81548 - protein, 119 aa, Zea mays
  Coding DNA Sequence Number=SeqID_39769
MPPRTRLTTRKSTGPIGVPRHQLAPRHESSSSGSNDPIGDLEARVYCNTLHEEVHILYSQLHPSEPAPPAEAEAGPSHVAGRALGGELDLFEPPPSLRLVDVWTPTPDDEAAKTDGKQE

SEQ ID NO: 81549 - protein, 75 aa, Zea mays
  Coding DNA Sequence Number=SeqID_39770
VYCNTLHEEVHILYSQLHPSEPAQPAEAEAGPSHVAGRALGGELDLFEPPPSLRLVDVWTPTPEDEAAKTDGKQE

SEQ ID NO: 81550 - protein, 131 aa, Zea mays
  Coding DNA Sequence Number=SeqID_39771
  Subcellular localization annotation: CTP_CleavageSite=57; ConfidenceScore=5.69e-01
MVSSAARGLAQVRSWSLPSPTELLFCSRPSALSLWSCVVSSIFFPVLSPARRNAAARCGHGFSLCRALGVLDVMPQQAAAATPFAATRSPGRNYFSLYREEVTCQGSRRFLYIYKSKCVWLRSQICAIEKW

SEQ ID NO: 81551 - protein, 109 aa, Zea mays
  Coding DNA Sequence Number=SeqID_39772
MTQKRCAERRREARLGERDIAKGVATAACCGITSSTPRVRRRGDVEAAAVDRRCCTAQIGSTLVRRWPGKRSGVQRDRMKTRLKESLATATEGSSTVGELDAHRRLVHG

SEQ ID NO: 81552 - protein, 138 aa, Zea mays
  Coding DNA Sequence Number=SeqID_39773
MKTRLKESLATATEGSSTVGELDAHRRLVHGWERALAPVERLGVVGQRRAGGKKKRQGSLKLRGTERGSDSNLWGVEPHPGGACVREKPGSQEMEEGSDCQRASAVKATTTRGIGGLGRMLLVGWYQELVKRLVSTTG

SEQ ID NO: 81553 - protein, 87 aa, Zea mays
  Coding DNA Sequence Number=SeqID_39774
MDPLRGKGAWMGEQRHRGPVCLRGAELERLGACVREKPGSQEMEEESDCQRASAVKATTTRGIGGLGRMLLVGWYQELVKRLVSTTG

SEQ ID NO: 81554 - protein, 154 aa, Zea mays
  Coding DNA Sequence Number=SeqID_39775
MSLVVAVQPSAEAVVNTTVLMVVKEAILYHGCFLPWWVWSGLRPPYRSKRVSPGAPRRAPKTRDVNGDPIPANPWGIPLLGYGYGTKIVPMGMDMGQNLHPLGKRVWVWEATIRTRLPMGISYMYICRVCMNELRLSRPPSPARQRTRPQVLAQ

SEQ ID NO: 81555 - protein, 116 aa, Zea mays
  Coding DNA Sequence Number=SeqID_39776
MGTIFIPYPYPNREIPHGLAGIGSPLTSLVEAKLATFGNFQGRSAMHRTVRCASGSNGYYDANGHLQRHLMRYSERQSQSTRGRRTGHSTVPVRCSTGQPGDLTSQSSNGRTLTAG

SEQ ID NO: 81556 - protein, 72 aa, Zea mays
  Coding DNA Sequence Number=SeqID_39777
MESAVSFDGAHPEIQRMRILLTSCPRRSARWLKMIPTSGAHMSVSHRLSAGERGVTGFWARMAAPLWSPPRG

SEQ ID NO: 81557 - protein, 72 aa, Zea mays
  Coding DNA Sequence Number=SeqID_39778
MESAVSFDGAHPEIQRMQILLTSCPRRSARWLKMIPTSGAHMSVSHRLSAGERSVTGFWARMAAPLWSPSRG

SEQ ID NO: 81558 - protein, 91 aa, Zea mays
  Coding DNA Sequence Number=SeqID_39779
MNKNTGIQSAITNGTLVPSPRDISSAELEGVCHHQKLEEEVARRPAQEVEPRLASLSAPARMTNTLDAEDGIEITARLASPHPGAGGHRLG

SEQ ID NO: 81559 - protein, 550 aa, Zea mays
  Coding DNA Sequence Number=SeqID_39780
  Homolog annotation: Hit_ID=Q6QP51; Match level="QueryCoverage=17%, HitCoverage=54%, E-value=9e-11, Identity=52%"; Hit description =Putative growth-regulating factor 1
  Subcellular localization annotation: CTP_CleavageSite=39; ConfidenceScore=5.23e-01
MNKNTGIQSAITNGTPVPSPRDRRDHQKALVRVLAQGTRTSHQSQRAGRSKAHRQDASSTELEDGCHHQKLEEEVASRPTREDQDHSPACLSPSRGWRSPSWVTAGGGVQLSCVMKILEAERWLKGTNSHGVAFLQRQDGKDCGYPPSGGLEGGKARCIRERKDMVAFQGGHPPFKGDSPYLRPQPSGTESSPTRSKVLPLRRGDWVPHIMQAGPEQKKPNRRTRCMQPPSGYKRLSTFVQTSGRKGGQPCRRHATVPGGRTSPTSNTPSMEAQAHASCNRRAGCFVQATAPPLAPLPRLLDCGTNAATRGDPAHDPVAPAWRDGGASGRRSERRFAFAIMTASKKAGPSEGFNSRLRARGLHTHYWSEVRRPAPRKGSTVASGYPGSAPTTDQGFEGWPPKEARGCSRKPGSGQTVDSVNIPARELGTRPCTRATTSSHEGTTRPAEALREALRPRRSQTTPSEASGATPGGCDLAHPPEQYAKKCGPAARKAGPLAKKCDESLQASTNTPFEARGLLSGTIIRGTLKAPNSQLVAPISIKLQRPDGCD

SEQ ID NO: 81560 - protein, 107 aa, Zea mays
  Coding DNA Sequence Number=SeqID_39781
MLHSIDFAVLLIVHRGVIVSPIGEGNARLNSMVNLVVVLNTELDNALNELGKAQAEIEKLRAEHAARHYQDGGSPAPVRIQHPYRSPPCGRFAYGTPDCRTQIDLEP

SEQ ID NO: 81561 - protein, 158 aa, Zea mays
  Coding DNA Sequence Number=SeqID_39782
MKLSEEQEPEGWIAKSITRDAARECHFHDALHTLLRWTFDRHTWSIEYRCVVYQHRRELYPGRWEATCLDCSLFSGVDDDLDLKYYPRRLIDSAGSVIVSLVGEGNPRLNNTINLVVVLNTKLDHALDELGKHPYRSPPCGRFDYGTPDCKTQIDFDP

SEQ ID NO: 81562 - protein, 223 aa, Zea mays
  Coding DNA Sequence Number=SeqID_39783
MARVACTFHGKRLDGGVSVLSVGVNPFWSLETRVRVAICQGCPKAGRRKLRTTYGRDKACTKTTLRKATGPQGVPRHQLAPRHEGSSSESNDPIGDLEARVERITMELCHGGRERARASRRIAELLEEDCEATARARVEELSVALENLEVYNNVLHEEVHVVYDQLHPNMLSEVVEMGASAAEVDEGGLYGELDIFEAPPVNVVDNHPPEASSRSGAAKDVED

SEQ ID NO: 81563 - protein, 142 aa, Zea mays
  Coding DNA Sequence Number=SeqID_39784
MSEETGFALIPAVMEPPKVLGPPTDVLVLRTSDSHADQNGFTPTESTDTPPSSILPWSVHATLAICSLPLCGGLFDIGPTKVTRDGNQFPRKEVHQLFITQFLSPNKSYKVIKILKQQEEGIMHWGLPCVAGGSGSTLQMSK

SEQ ID NO: 81564 - protein, 62 aa, Zea mays
  Coding DNA Sequence Number=SeqID_39785
MGCTGGAPNGCSPRPSNGFFEDNPFEGLPFEKIGMKLFALCFGDGWECLLNALRLFSDRGWK

SEQ ID NO: 81565 - protein, 225 aa, Zea mays
  Coding DNA Sequence Number=SeqID_39786
MGCTGGAPNGCSPRPSNGFFKDNPFEGLSFEKIGMKLFALCFGGIYCMPCTDVTVLKNILIIPGRPPPMGVGKGRLDGWECLLNALRLFSDRGWKSLVTRNTQRRSSPLSPRDLRLPSPCESCLAAEVWTYIRAVERSGLEGSDESEFSSDEEDSDGGEDEDDDDDDGDDDDGGDGDGDGGNGGGGSGGKGSTRGGSSTGSTRGGSSKGSTKGGGGKGSGGKASG

SEQ ID NO: 81566 - protein, 76 aa, Zea mays
  Coding DNA Sequence Number=SeqID_39787
  Subcellular localization annotation: CTP_CleavageSite=58; ConfidenceScore=5.47e-01
MAGSAAPAPCPVPARLGRPWPVQPPWPQLARPFPRPGLARPYLRSPALARTIRLKSPRNSQEKPLSSSRLVEASVP

SEQ ID NO: 81567 - protein, 112 aa, Zea mays
  Coding DNA Sequence Number=SeqID_39788
NDPVEEPEELAGEAPEQQSVGGDGYEIDGFGYDYGTGKWYSFRLERVVSIATTAQEKMKPWKETSRSSKTTTSSRRGLAATPSRLLVKAAFIYVSFPHFDFYCKDYVDVSDV

SEQ ID NO: 81568 - protein, 92 aa, Zea mays
  Coding DNA Sequence Number=SeqID_39789
MTRRSSWAARNSDNMLTGSPEKRVAQNGPAVQDNSLFTGQTKDENDPVEEPEELAGEAPEQQSVGGGKCPLTYLCPIHYLIHLPLYTFMPKD

SEQ ID NO: 81569 - protein, 446 aa, Zea mays
  Coding DNA Sequence Number=SeqID_39790
MAGSAAPAPCPVPARPRPPLAENDPVEEPEELAGEAPEQQSVGGGKCPLTYLCPIHSLIHLPLYIFIPKVVMRLMVLVMTMVLVSGILSVWKGYIGLITWVMLKLGFLLMARLRHTARKSVIPFLPSRLAERPLRRPVAGQSSHLERLHHRLHEEQERRRQEQQGSSFSLHQEIESVRSCSPVLPLEPPPAPPLGVPASRVAAGGDPDDGDGDDSSSHDTDFSANPEPEGWVARPITRDAARGCHFHDALDTLLRRAFDRHTWSVEYRCVVYQHSREVYPDRWEATCLVRCPENSLQGAEVCSEHYSISEWDSAEAAMQDAARRALSHYCSVFGGAADGLDLKYYPRRPSGSTGGVIVSPVGEGNPRLSSTVNLAAVLNTELDHALDELSRARAEIALLRAERAERRHLDGGSPAPVGTQHPYRSPQRGHQSYGNPDCKTKINLEP

SEQ ID NO: 81570 - protein, 78 aa, Zea mays
  Coding DNA Sequence Number=SeqID_39791
MLSDPVPTPAEAVSGVALEPTPETTEDASGALAAAAAGEDLPPGVAEGSRFLGLRTQPLLLNFWRLRPRKMLVLSRTV

SEQ ID NO: 81571 - protein, 483 aa, Zea mays
  Coding DNA Sequence Number=SeqID_39792
  Subcellular localization annotation: CTP_CleavageSite=70; ConfidenceScore=5.67e-01
MLTPSVRNRPPTASVASCGQRWPRWRERRLTSGASWRGRGGRPTRLLSRRRLRRRRLTWHGRRAILPRERAEQLQERLTALESRVERAEAMSRAEAERTRQLLVDTYRGLGAGTGDFEVPDREPGLRCLEWVQEELQALPTVVEGFMAYASLVTCEGAMNALSREGCRHFEVFDQADEDFERDIFKVEDPVVKESAGALYDRMWGLHGREVVRERAETARAQAARGERVDDFGALNSMLSDPVPTPAEAVSGVALEPTPETTEDAPGALAAAAAGEDLPPEVAEGAPDALAAAAPSAEDPAVVAVATTAEATAEPTAEAPAASGPSQVQDFGPAHTTATTKFLAASTAEDGNECGGSASEFFDCADSGSSVEWTEESSEEDLDYFAALDVAAAEASPHIAGAGDVAGPSTGRRRRRAIAKRRVSGAEGAWLRVSGAGRQELLSLPAAVNTGEGELRSLFAGDELRIMLFNYREMGIIPKVEPM

SEQ ID NO: 81572 - protein, 553 aa, Zea mays
  Coding DNA Sequence Number=SeqID_39793
  Gene Ontology: Mol. function=protein binding
  Homolog annotation: Hit_ID=Q6Z7B7; Match level="QueryCoverage=94%, HitCoverage=96%, E-value=0.0, Identity=64%"; Hit description =Putative nin one binding protein
  Pfam annotation: Domain name=NOB1_Zn_bind; Domain location=405-476; Score=149.7; E_value=7.6e-42; Accession=PF08772.1; Description=Nin one binding (NOB1) Zn-ribbon like
  Subcellular localization annotation: CTP_CleavageSite=60; ConfidenceScore=5.24e-01
MEAWPPLAPAAAAAATPVAASDDAAVTPAGSGAWGPAATAQRKAVEQESAAQAVSRIVASCANSSGVAVAVVDANAVISGAPALSTSAGAPCHRAGGARGVTKFARETGDIQTLSDVDIKIIALAYMLEAEIHGSSHLREHPPPLLEVNVRKLSEAPLPGWGSNVPNLKEWEELDQMSEAGGDINSRILPLKDIENQDLPMSETNSVCEAQEDTEDQPSEKDAPVAWEEDENNVGWMPAVSRSTHRRYLRRKARRDALKESGQSFETSSVAASIDSDKVLSENGGLEHGLTSTGGLSSVPEKISASSDGFELQADPEIAGEQLHSDQLSYGDDTDACTKELDKLDIKGEDEGGDDAHSVDYESSEQSWALRSLSESTIACVTSDYAMQNVILQIGLRLIAPGGMQIRQMHRWVLRCHACYKVTQEVGKIFCPKCGNGGTLRKVSVTVGENGITMASRRPRVTLRGTKFSLPMPQGGRDAITKNPILREDQLPQKVLHPKLKKSSKADDFLGVEDIFSHSGDKKASLKPPVGKALAMFSGKRNPNDNHFSRKKH

SEQ ID NO: 81573 - protein, 113 aa, Zea mays
  Coding DNA Sequence Number=SeqID_39794
MHRVVPIKQPKASAVPPRALSVLPEPKFTEHRLEHAAPPPAKPPEPQPPWPAHSSHSRATPVARLALPDAREASQVLGPGQSLAGDPESPSPDFGHPPPRVNRANQELSKFVS

SEQ ID NO: 81574 - protein, 91 aa, Zea mays
  Coding DNA Sequence Number=SeqID_39795
ADLNMRQRRWLELIKDYDLESLAGDPESPSPDFGHPPPRVNRAIWPESSPPTSSPACARGPTIAGDDPHIDVTVKTSPTPLTTSLEQSRRW

SEQ ID NO: 81575 - protein, 324 aa, Zea mays
  Coding DNA Sequence Number=SeqID_39796
MTRDEYVVGGEVKTSIPLAVRGVTEEEAMSGGLCPVVGRERRLEEEATDHVGGGANDAFDQTVLGRGVKDAPESTTQSEGGGVIAMVLKVEAREVGSHPQASGVQGVGWGSPEAGDGAEPESSGARLGRRCQEGRRRRTGGTQGLARPHGDGPGPGVVELRPCLAATPAGRTTLGGAATPTATLSGTTSIGGGGRMRGCRDGGGSAGRSLSRRRVRCLALRRCMATGRRTVEGRGGSGCLSIHGKLLKEKLVAHDMEGGEGHSPLDESLQVALAGVEATEIPLRELVELGVEVERSSLPVPEELPLKSEPCPTSGVRLVADDVL

SEQ ID NO: 81576 - protein, 145 aa, Zea mays
  Coding DNA Sequence Number=SeqID_39797
MVYEGGVGEADRARQQGRISGSRRSGSPTAMVDEGGRGSGPRSSTGLDVARVETLAEASRPRVTRVEPRAKASEPLEARAMAQGRAPGVEGEPDRTQGESRDRWVGRSQQRETYLCRKQRDEVKTTIPLVVRGVTKEEAASGARR

SEQ ID NO: 81577 - protein, 133 aa, Zea mays
  Coding DNA Sequence Number=SeqID_39798
  Gene Ontology: Mol. function=structural molecule activity; Cellular component=cytoskeleton; Biological process=sperm individualization
  Homolog annotation: Hit_ID=P10987; Match level="QueryCoverage=57%, HitCoverage=20%, E-value=5e-33, Identity=92%"; Hit description=Actin- 5C
  Pfam annotation: Domain name=ADK; Domain location=2-101; Score=-57.3; E_value=0.0008; Accession=PF00406.12; Description=Adenylate kinase
  Pfam annotation: Domain name=Actin; Domain location=12-133; Score= -216.0; E_value=0.0055; Accession=PF00022.9; Description=Actin
  Pfam module annotation: Pfam domain module=ADK::Actin; Domain location=2-101::12-133
MSEIVNQGKLVSDEIIINLLSRRLEEGEEKGELGFILDGFPRTMRQAKMTQIMFETFNTPAMYVAIQAVLSLYASGRTTGIVLDSGDGVSHTIPIYEGYALPHAILRLDLAGRDLTDCSSALDCVCSKDIIQI

SEQ ID NO: 81578 - protein, 230 aa, Zea mays
  Coding DNA Sequence Number=SeqID_39799
  Pfam annotation: Domain name=ADK; Domain location=164-230; Score= -86.7; E_value=0.1; Accession=PF00406.12; Description=Adenylate kinase
MPLPTHTLALLLRRLFTTRSIAAVQGLLHKLLDIGVDARPQFLEQQLKKAKGPNLMFGRGDETEGSDNSKSKFKDDEQDGQVSSRSLKKAIGFKTHVRYCDTLMVLKLWIMSKVPFRSSTGHRVLHVNGQQGHRAGGQKQPATTVGHSFLSYICMFFKGMYMDLPNTLDFCKQPKILSEKKLAKIVNQGKLVSHEIIINLLSRRLEEGEEKGELGFILDGFPRTMRQAIS

SEQ ID NO: 81579 - protein, 706 aa, Zea mays
  Coding DNA Sequence Number=SeqID_39800
  Gene Ontology: Mol. function=zinc ion binding; Cellular component =nucleus
  Homolog annotation: Hit_ID=Q7XCX5; Match level="QueryCoverage=94%, HitCoverage=37%, E-value=1e-115, Identity=38%"; Hit description=Plus- 3 domain containing protein, expressed
  Pfam annotation: Domain name=GYF; Domain location=607-662; Score =39.3; E_value=1.4e-08; Accession=PF02213.6; Description=GYF domain
  Pfam annotation: Domain name=Plus-3; Domain location=282-389; Score =151.5; E_value=2.2e-42; Accession=PF03126.8; Description=Plus-3 domain
  Pfam annotation: Domain name=SWIB; Domain location=144-219; Score =86.4; E_value=8.9e-23; Accession=PF02201.9; Description=SWIBMDM2 domain
  Pfam module annotation: Pfam domain module=GYF::Plus-3::SWIB; Domain location=607-662::282-389::144-219
MEVDFDDKGSWWYLFKDYWLNLKTNLSLTVEEISAAKSRKSGELPDTNDEVNSESSSGRNLESNTSKKRGRKRSKQAAINEGSEGKASTRKSAKRDLSGIHDVQTSSGKKVRKLSRRSLSSQHSSKDSESVGTSTSSAEEDSWASKELINFVAHVRNGDKSVISRYDVQPLLLDYIKRNKLRDPRRKSQIICDSLLQSLFAKERVGHFEMLKLLESHFFMSEVSPIDADENHGGVVDPDPSQDADGNSEASVVMSSEKRRKSRKYDLRHQPNLDDYAAIDNHNIGLMYLRRNLMEELIGDVDTFDEKVVGSFVRIKIPGTGQRQDIYRLVQIVGTGRSAEKYKYGKRTTDITLEILNLDKREAVTIDIISNQEFTEEECKRLRQSIKYGFIPRLTVGEVQEKARVLQTLKVNDWIESEKMRLGHLRDRAIFTLRECVEKLRLLSTPEERARRLNEELEIHADPAMDPYYESPEEQEQEIEKSSFNKSRGSFLRKDGNPVPPGKGDGRNAAQRDSKTNWESNRNTWAESSSHMESPLPRRSTFSSQGESAGYTSKSESPNTGAQTVKLEGTTRSAPQGSPGASSGILANNICSGAKTAPQSAINESEKIWLYMDPSNKIQGPFSIIQLRKWNSNGYFPPSLKIWKASEKQDDSILLTDALAGKFEKDLPPWEPPHVSLFQINKTPLEQSTIAGEQTPKSVVAKSFSK

SEQ ID NO: 81580 - protein, 773 aa, Zea mays
  Coding DNA Sequence Number=SeqID_39801
  Homolog annotation: Hit_ID=Q10R44; Match level="QueryCoverage=27%, HitCoverage=21%, E-value=3e-89, Identity=71%"; Hit description =Nucleoporin family protein, putative, expressed
  Pfam annotation: Domain name=zf-CCCH; Domain location=442-467; Score =12.4; E_value=0.03; Accession=PF00642.15; Description=Zinc finger C -x8-C-x5-C-x3-H type (and similar)
  Subcellular localization annotation: CTP_CleavageSite=53; ConfidenceScore=5.20e-01
WPRPPAYLSPPAAAAANAATCTPARRGRRERRDLQSPLEQSTIAGEQTPKSVVAKSFSSSNQRHGYSSTNLGTTMIHSGTQGYYGMQNSHAAYTSQHSLTGSWNATSSQFGVAVNPVTPTQPARGSFSGQNIVSAENMGHLTPGTAPAAANAEMVNSDLTSQKQISHLPQTDGILADDIESKSGEDVSHGKVSSSAKAIGPLGAQLGQGQLNTQQHEADTKNQMSSTDVSNSTMPSQMMSTPSAASVQPSLTTIAGSDNQSSGWAVPTQVVNTSGQSQITENLTWGNTPHGDASLGWGMMGQNNMNMPWVASAQGASGYNMGAAMSTQPNSVPNMGWLPNPGNTNMNMIWAATQGQGIPNAAAMMGGQMQGVAVAPWGGVAAGNANSYPAWGNQQVGNMNQNVRWSAPVQGNPSQANNNMNWNAPNESHGSHALVPMGGHGGHRAVCYTFLERGDCFKVDCKFAHSTNTEGYPCIQDPGNERRYENHNERNDRQFDRQPSDNERHHVRPGGRDDDRQADRSQSREPRQGAGYGVTKEARASPRREYRGIPGDGGDMGDVGYCESWSRDDAQRQYIVELGIPEEWMHEALALYHEYYGDKQGALENLIQCGNWKKAHTIFVTSVAHSMFLSSNHQEVWRITSALENHKYEIADWDLGAGIYIDFYVLKNSMQERNAMDDSGSLEEMSESCGSFFGRLNESLLVWGSKLPVESRACYSKMAEELCALLVDTPSETLNLPMGCLLMMLNAPVPDESRSSYLQDALSVFTEILCSDP

SEQ ID NO: 81581 - protein, 76 aa, Zea mays
  Coding DNA Sequence Number=SeqID_39802
RLRIFTHKSCYPSAKGSRLPIHLYRGGEAGTAIAAKSSRGPPYTDHSPTALAPFGYQDDSSDPRNLTASRSNTNKH

SEQ ID NO: 81582 - protein, 444 aa, Zea mays
  Coding DNA Sequence Number=SeqID_39803
MGRRETEREGGKPEGDRRKGETRGLRVCPAPRSEVVPFTHKSCYPSAKGSRLPIHLYRGGEAGTAIAAKSSRGPPYTDHSPTALAPFGYQDDSSDPRDLTANRSNTNKHETQCIVTNGRRVLFQRNLGSLKQNARAKGLLCPQPPEQTPDTAALSDERRAYGIGVVCDASHGRRRAYGGVEAPPNSRYRWQSAVAARETKVAVLPGFAYGPEGATTGEIEGGVFQGPRPQIGDETAKTVPRASARRSALVIEVVPFTHKSCYPSAKGSRLPIHLYRGGEAGTAIAAKSSRGPPYTDHSPTALAPFGYQDDSSDPRDLTANRSNTNKHAGARGKNPETQCIVTNGRRVLFQRNLGSLKQNARAKGLLCPQPPEQTPDTAALSDERRAYGIGVVCDASHGRRRAYGGVEAPPNSRYRWQSAVAARETKVAVLPGFAYGRKGRRLGK

SEQ ID NO: 81583 - protein, 244 aa, Zea mays
  Coding DNA Sequence Number=SeqID_39804
  Gene Ontology: Mol. function=histone deacetylase activity; Cellular component=nucleus; Biological process=histone deacetylation
  Homolog annotation: Hit_ID=Q94F82; Match level="QueryCoverage=78%, HitCoverage=37%, E-value=5e-86, Identity=85%"; Hit description =Histone deacetylase HDA101
MVTVDRGTRGRDLTLLAGHQQRHQAAISKVHCLAPPHSATDRHEGASAGYCCDLFQTGVALGQEPEDKMPVNEYYEYFGPDYTLHVAPSNMENKNTRQQLDDIRSKLLDNLSKLRHAPSVHFQERVPDTEIPEQDEDQDDPDERHDPDSDMEVDDHKAVEESSRRSILGIKIKREFGENATRVQDGGRVASEHRGLEPMAEDIGSSKQAPADASAMAIDEPSNVKNEPESSTKLQGQAAAYHKP

SEQ ID NO: 81584 - protein, 178 aa, Zea mays
  Coding DNA Sequence Number=SeqID_39805
  Pfam annotation: Domain name=IQ; Domain location=34-54; Score=26.2; E_ value=0.00011; Accession=PF00612.17; Description=IQ calmodulin -binding motif
  Subcellular localization annotation: CTP_CleavageSite=33; ConfidenceScore=5.04e-01
MQATLQKVEQGLLQIKAAVQHEQHQLALSARLRTSAAVGIQAAARGFLARQSVREMRRQMLETALVTVDLGTRGRDLTLSDGHQQWHWAAISKCEHGTCPAGDKLQLYDNGGREGTHLVINKGTLFSATTFRYRPPRGRLRWLLLRPIPGPKSIIKFVSLTSYSRHSSRPQNGVPILM

SEQ ID NO: 81585 - protein, 189 aa, Zea mays
  Coding DNA Sequence Number=SeqID_39806
  Homolog annotation: Hit_ID=Q2R0H4; Match level="QueryCoverage=23%, HitCoverage=12%, E-value=2e-07, Identity=68%"; Hit description =Oxidoreductase, aldo/keto reductase family protein, expressed
MGQVIYIGANDKARFIYVRNNYMSYFCPRYVPMFVEIEYDPNCQYTSVLMEEQLEALGRAIVAGKSWEQFVLCYIWVHEVVYASGGKAHERCGLYISYIVLLVECNICSESVVMLFVCKYTMFDNIIDLSQVRAQRGGLSRSAAHSSHLSTQDRAEVEQLREELNGVSTITRRCTLMVISDSDLPFYVL

SEQ ID NO: 81586 - protein, 71 aa, Zea mays
  Coding DNA Sequence Number=SeqID_39807
MGQVLTLPSLNYLAATEHIYELHSQVCSNVCGDRVRSKLPVHICSNGRAARGSLKSNSCWQGCVCKWWKSS

SEQ ID NO: 81587 - protein, 208 aa, Zea mays
  Coding DNA Sequence Number=SeqID_39808
MGSARVVFVSLWKERNLVEVGTVQPSLGFKDFCRAARLPSPTNGQFDGEKQVGLRPPPRPQLQGFSSSGLRRRSAPSGGLPPRGSGAAFHPSPERQSRRRGLDEGGSEDLPMRFGAAGACWCGVGGQVVATVGAEVVAAGEGFSARTPGPPSPWLEWLEWAAVSRLEFVVPRASWNPRLLCDEPKPEAAVSAWTEAELAGEETSSAQE

SEQ ID NO: 81588 - protein, 108 aa, Zea mays
  Coding DNA Sequence Number=SeqID_39809
MGSARIVFVSLWKERNLVEVGTFQPSLGFKDFRRAARLPPLADGHPRGFKDFRHPCWGGGRAEPELYLPYGPAGHLLLQRSWERALTGLAEGADFDDAWPSGRKRRQL

SEQ ID NO: 81589 - protein, 84 aa, Zea mays
  Coding DNA Sequence Number=SeqID_39810
MARAHLGYDTEEVCGDLGIEECVLGENRVRFQRRGIARFTSIRPVLHPTSPTECQWSASLIRHLLSLMDLERHKPPGQHRRGPT

SEQ ID NO: 81590 - protein, 130 aa, Zea mays
  Coding DNA Sequence Number=SeqID_39811
METEDSRRTHQEETGCSRSRKTPAPESGPIQRGEEYASCREQADPESSRKKRRCREEYARRRLRRRTVGPLRCWPGGLCLSRSIRDRRWRIKEALHWHSVGEVGWRTGRMEAFMQRTFAPESRPEGDEIC

SEQ ID NO: 81591 - protein, 186 aa, Zea mays
  Coding DNA Sequence Number=SeqID_39812
MPTLQYENKWHCNVKEVVAAKREHLTLLQELNPRSDSKTDIPHLQGFNLKLILTKSPSSANVTSPTLSIISPYSSASISIAVGATAGAFASSHPPLLVPRRRLSGRGRDEDGGGSSSKSHIEEDSYDGGSGRGYEADDTSKSAAAAQSNASCEDETPPPPSEKERDLRPYVRRIMASAPSSRHGER

SEQ ID NO: 81592 - protein, 119 aa, Zea mays
  Coding DNA Sequence Number=SeqID_39813
  Homolog annotation: Hit_ID=Q337H4; Match level="QueryCoverage=69%, HitCoverage=8%, E-value=9e-17, Identity=59%"; Hit description =Expressed protein
MEAEEYGEMMESVDEVTFTLDGLRPAAQKRTRRASLLALLGICASAERHRVLRSQGCGGSDVDDAGGFGFITRIGEAPALEGAQVSAETFDSGRTTTKQTKKPQSKIDASVWENNSGRH

SEQ ID NO: 81593 - protein, 111 aa, Zea mays
  Coding DNA Sequence Number=SeqID_39814
LIWPPQFQGTLEASLLLFGSYRPTPEDPVPTPAPVIDTQTKDIAFHQFETQGAAVPNDDDDDDDDDFGVPPLPPMPPHTHDHKARSSSAAPATPPAIDPALAAILQTLTQQ

SEQ ID NO: 81594 - protein, 311 aa, Zea mays
  Coding DNA Sequence Number=SeqID_39815
MDASATNGLQGGCYIQLWLLGALVSHSEFDVVDFLICEIEDTVLDGLRARRQQPYAHYLCHIFAQLIWPPQFQGTLEASLLLFGSYRPTPEDPVPTPAPVIDTQTKDIAFHQFETQGAAVPNDDDDDDDDDFGVPPLPPMPPHTHDHKARSSSAAPATPPAIDPALAAILQTLTQHIPVFRFPQFSQHRLHLFRLLLCQPFRQDPLFLQSVLLPLRSGPVTLVFSSLVISSVSTQPPVPPAPAVTTATVAVSVTSSALAAPAAQPPSESVPAPASTADPGSETDSNPQLAFALLPRPRPDAPPPPPSSSGV

SEQ ID NO: 81595 - protein, 105 aa, Zea mays
  Coding DNA Sequence Number=SeqID_39816
MASLSRTRSSKHISFWMRSGHPSFVDEAPEDQLRKESMREFTRESYRSVRAISWRPDPQVYPRRWSQKPVPRDPLPPSPNKHGFSPLSPLSRDDQGLPGLGEGLR

SEQ ID NO: 81596 - protein, 144 aa, Zea mays
  Coding DNA Sequence Number=SeqID_39817
MAQSTVGSLRAVGAPDSPVPPSSRWLGHVSRADHAADRWPYRPLAHRTVRNGPRAHFPFTWSSSNSRRRPRNTLVMRYFKEFKSPRLKSSTLILFKWGSVPVKFLLWRKRRRPVASLSRTRSSKHISFWMRSDHPSSIDEAPED

SEQ ID NO: 81597 - protein, 524 aa, Zea mays
  Coding DNA Sequence Number=SeqID_39818
  Gene Ontology: Mol. function=DNA-directed DNA polymerase activity; Cellular component=DNA polymerase III complex; Biological process =DNA replication
  Homolog annotation: Hit_ID=Q2QW40; Match level="QueryCoverage=79%, HitCoverage=36%, E-value=1e-101, Identity=49%"; Hit description =ATPase, AAA family protein, expressed
MGVACCSLLLAVTDAELERLQQALRILSDAEKQIRLSSERSTWFTAALLQLGSGHNSEITQSRSSSKQSAKATSETMMEAMRESSASRSTAHHLSTFPDSKKIVDLKTTSGHSSPHASLSSRMRHNENMIYAEHMSVDRALLDSAQTSISSEQKGMHSGISDNLTRIWMKCIENCHSKTLRQLLYDHGKLTSVKECEGTIVAFIAFEDNDIKFRAQRFISSIRNSMETVLKCNVEVRICLMQEFLAGGLKHETYPDETAESDVLSCSTNSERRKGVLNLSGAGGVQPNNVPMIISEETSGMHRTRGQDVSIEQLKVSAFDEQRLESAWLQAAEKPMPGMLNQGRPERNQILPQNGGQHHGRSSMATVVPSRHVDKDLSNELKALKISDSHGPHNGQDVQMESGYAISPSLLHRNNHLANCDNESVVSESGAPGCHGLFPCWKTEKTKRRKGKGQTRLRYLRTRIGITEGEAQSIRRLIQHRSCEQKSFGMVAGKETDLKMKRLFGPRWITIELLSDVKGINVIL

SEQ ID NO: 81598 - protein, 132 aa, Zea mays
  Coding DNA Sequence Number=SeqID_39819
MEGATDEGAPAAEAEHVDIEEDDVDEEEEDYTILMPAKPSHLDFGKSTVSEADMPMMMLGTFGVRRYLRTRIGITEGEAQSIRRLIQHRSCEQKSFGMVAGKETDLKMKRLFGPRWITIELLSDVKGINVIL

SEQ ID NO: 81599 - protein, 117 aa, Zea mays
  Coding DNA Sequence Number=SeqID_39820
  Gene Ontology: Mol. function=protein dimerization activity; Cellular component=nucleus; Biological process=regulation of transcription, DNA-dependent
  Homolog annotation: Hit_ID=Q9LLI9; Match level="QueryCoverage=73%, HitCoverage=8%, E-value=3e-45, Identity=94%"; Hit description =Cellulose synthase-1
  Pfam annotation: Domain name=PHD; Domain location=36-84; Score=-0.5; E_value=0.064; Accession=PF00628.19; Description=PHD-finger
MGMVAGSHNRNEFVMIRHDGDASGPAKPTKSANGQVCQICGDSIGVSATGDVFVACNECAFPVCRPCYEYEREGNQCCPQCKTRYKRQNVGFLSTSLSVCNLYEASMTEFTSHAYFT

SEQ ID NO: 81600 - protein, 96 aa, Zea mays
  Coding DNA Sequence Number=SeqID_39821
MTNSLRLCEPATIPILISKPHQQAPMRRRVAAGQTHRSCVGWEIKVAVGSGRAGRESGHGGDNGKEIWGREGGIKAVALVPLRSRFGLVRGRLRSG

SEQ ID NO: 81601 - protein, 258 aa, Zea mays
  Coding DNA Sequence Number=SeqID_39822
  Gene Ontology: Mol. function=3'-5'-exoribonuclease activity; Cellular component=intracellular; Biological process=RNA processing
  Homolog annotation: Hit_ID=UPI0000660714; Match level="QueryCoverage =60%, HitCoverage=13%, E-value=8e-15, Identity=34%"; Hit description =UPI0000660714 related cluster
  Pfam annotation: Domain name=DUF1740; Domain location=2-192; Score =128.2; E_value=2.2e-35; Accession=PF08424.1; Description=Protein of unknown function (DUF1740)
MDVARYRSQNMMEAFGLNHLRFGSSHIDLDSDLDGMDNKDKVVSTQPQKAARLQTPERKISIMEKAVELNPDNSKVSEIRKSYVYAVQALSAACTKLCRQDNKSMDSKSSSLVQLEVGLVDIFVNLCRFEWQTGHRELATGLFQAQMEFSLFAPPLYLTTSSKQRLFEHFWNSGGARIGEDGALGWSEWLAKDEESRQKLSMQENSQETETGGWSGWFDPSLGNTETNDLSNKSLEPSLTDGNDAEDLDAEDSPAQDD

SEQ ID NO: 81602 - protein, 720 aa, Zea mays
  Coding DNA Sequence Number=SeqID_39823
  Gene Ontology: Mol. function=3'-5'-exoribonuclease activity; Cellular component=intracellular; Biological process=RNA processing
  Homolog annotation: Hit_ID=UPI00005C2192; Match level="QueryCoverage =71%, HitCoverage=46%, E-value=3e-43, Identity=26%"; Hit description =PREDICTED: similar to Protein C14orf102 homolog, partial
  Pfam annotation: Domain name=DUF1740; Domain location=85-337; Score =424.6; E_value=1.4e-124; Accession=PF08424.1; Description=Protein of unknown function (DUF1740)
MDVARYRSQNMMEAFGLNHLRFGSSHIDLDSDLDGMDNKVRAGGRYYSAKNAVSERNKGFKHLKIFKGNTSVMLAEDFVPFGTQSLPLKSTTVEQELEESWEDEILRRTREFNKMSRERPHDEKVWLAFAQFQDKVASTQPQKAARLQTTERKISILEKAVELNPDSEELLLCLLKSYGKRDNTETLLTKWEQILTKHPDSSTLWKQYLLLCQGEFSRFKVSEIRKSYVYAVQALSAACTKLCRQDNKSMDSKSSSLVQLEVGLVDIFVNLCRFEWQTGHRELATGLFQAQMEFSLFAPPLYLTTSSKQRLFEHFWNSGGARIGEDGALGWSEWLAKDEESRQKLSMQENSQETETGGWSGWFDPSLGNTETNDLSNKSLEPSLTDGNDAEDLDAEDSPAQDDVESLLKKLGIDVDAESNSEVKDAETWNRWASMELSRDNQQWMPLHENYEEARFSLMCQFIDFYGGKISRWTSTNSPSWLDRILSLENITDDILEDLGAVSDVVNKNQSSYSCKYKLESLLGSMCDLSQRPGLMKFLKNAILLLLGVFPRNHILEEAVLVTTQMFTPQENSSSIQTNASRALAKSMLKKDRQDFLLCGIYGRTEAMNGNIEQARKIFDMALLSTEATSEIVLEQASRRTGPAWRVADVPVVALWGRRMGGRGQGWRCLAQAMAAWTPGGAAAAAPDGRGRTGTGTARTGGTAAATADWTDWAGGIPIP

SEQ ID NO: 81603 - protein, 129 aa, Zea mays
  Coding DNA Sequence Number=SeqID_39824
MNIERLAMSTDSGARIPLDVLEGRKNFSYCLLSAVAAAVPPVRAVPVPVRPRPSGAAAAAPPGVQAAIACARQRHPCPRPPIRRPHKATTGTSATRQAGPVRLLACSSTICTSAVAQANSLPVARLLKD

SEQ ID NO: 81604 - protein, 456 aa, Zea mays
  Coding DNA Sequence Number=SeqID_39825
MALDTCSYDDCWVLPPLDCWDWASELLFHTLEGAGAAAVFPETPGVQCSPSEASSGYLHDAIAPVSARRNKRQRMAAATTTPPSRRPATVCGDLQCLLAGLRDSSADAEGGADFRHDLNTTTAAETETRCSFVSGGGDGAGASSREEQQRGPSAQVLLPTPAAAAKGGDEEAKASAVVPPRRFPATVRAAAPLQLQKAAAGTAHAAARRDDRPRPVVDREHSFRAGAGAGAAATTAPASACHSLLSDYRAAAAVAGSLQHGQYFERVGFGEHAFEHVSGEDEKRGVGVLYPFAVVKPLGLDDGRMTTLDDVNQRILKRPARPVRHPVGPFAFGPAVSAHGLSLSGKAVVAMPAVRYNHGRLVATDPPRCLQSAPSLSLSAHAHLVQPPRRLQESRPPSPVPGSAIPVRVRPSAAPTRPQQGRPPPAKQGQSACSLAPALSALQQLLKRTACLLLAC

SEQ ID NO: 81605 - protein, 92 aa, Zea mays
  Coding DNA Sequence Number=SeqID_39826
  Gene Ontology: Mol. function=ATP binding
  Homolog annotation: Hit_ID=Q9LZF6; Match level="QueryCoverage=55%, HitCoverage=6%, E-value=8e-11, Identity=76%"; Hit description=Cell division control protein 48 homolog E
MKKTLQNLKVSCAGRGLMGYLGNKLQCKRQLCRKEKKVYSTAILERKKSPNRIVVDEATNDDNSIVALHPDRSCSSSATILCSSRSYIIWLI

SEQ ID NO: 81606 - protein, 276 aa, Zea mays
  Coding DNA Sequence Number=SeqID_39827
  Gene Ontology: Mol. function=nucleoside-triphosphatase activity; Cellular component=nucleus; Biological process=protein transport
  Homolog annotation: Hit_ID=Q9LZF6; Match level="QueryCoverage=77%, HitCoverage=26%, E-value=1e-109, Identity=87%"; Hit description=Cell division control protein 48 homolog E
  Pfam annotation: Domain name=CDC48_N; Domain location=66-152; Score =134.7; E_value=2.5e-37; Accession=PF02359.8; Description=Cell division protein 48 (CDC48), N-t
  Subcellular localization annotation: CTP_CleavageSite=43; ConfidenceScore=5.63e-01
MAAPSSPSRRSASSSSRTRACARFSVSSSSSSSDTRVYTSSVVAYTEQDRKEKKDYSTAILERKKSPNRLVVDEATNDDNSVVALHPDTMERLQLFRGDTVLLKGKKRKDTVCIVLADETCEEPKVRMNKVVRQNLRVRLGDVVSVHQCQDVKYGKRVHILPIDDTVEGITGNLFDAFLKPYFLEAYRPVRKGDLFLVRGGMRSVEFKVIETDPSEYCIVAPDTEIFCDGEPIKREDEERLDEVGYDDVGGVRKQMAPSESLLSFHYAILSFQTNL

SEQ ID NO: 81607 - protein, 47 aa, Zea mays
  Coding DNA Sequence Number=SeqID_39828
  Gene Ontology: Mol. function=phosphoric ester hydrolase activity; Biological process=carbohydrate metabolic process
  Homolog annotation: Hit_ID=P46276; Match level="QueryCoverage=83%, HitCoverage=11%, E-value=2e-12, Identity=80%"; Hit description =Fructose-1,6-bisphosphatase, cytosolic
MSFLMEQAGGQTFTGKQQALELAPAKLHDRSPVFLGSYDDRGTNSKA

SEQ ID NO: 81608 - protein, 503 aa, Zea mays
  Coding DNA Sequence Number=SeqID_39829
  Homolog annotation: Hit_ID=Q71ET7; Match level="QueryCoverage=31%, HitCoverage=15%, E-value=3e-71, Identity=87%"; Hit description=RNA polymerase II largest subunit
  Pfam annotation: Domain name=RNA_pol_Rpb1_1; Domain location=1-145; Score=-52.6; E_value=9.8e-09; Accession=PF04997.3; Description=RNA polymerase Rpb1, domain 1
MKMVAEFTAPKKKTDDQDQLPEPVERKQILSDERVLNVLKRISDEDCLLMGLNPKYARPDWMILQVLPDPPPHVRPSVMMDTSSRSEDDLTHQLAMLIRHNENLRRQERNGAPAHIIIEFAPLLQFHIATYFDNDLPGQPRVSGLECQFACIKSTDSRLVEECKYPEDGSPPRSFRYIRRPLNLLPLNFTIDPQCSSGATMIEAPTLRHSLGQDREDISEVVSDNGNDGIQNRRKRSIAKKQKSGPDEGSKKRSQRRRKIPMPLRSYRSIHQYPNTIYYSLMFLIVFHVTFIGVAYLGFVSTMAEKKTEMINIIQNCAVNHIACCVVYSQCGNRTVSSDKYTDRRTASWIVLSVWTRNDDNTLISRLLLLLGMLKLELLVITLFSLNGPFMEKLVYCTFSLTVSSDKYIDRRTASWIVLSVWTRNDDNTLISRLLLLLGMLQLELLVITLFSLNGPFMEKLVYCTFSFLQMMQQLGAVLDGRARRERHLRGIATGGLAGATCA

SEQ ID NO: 81609 - protein, 236 aa, Zea mays
  Coding DNA Sequence Number=SeqID_39830
MPSVVTGLSQDSRLAERSNSRDDLSGIVIRGTWITSLNVLNPEVATRHIPEDNKANRSDKTAVSSAFTNYDDVCLSTTAVVPPRHLPTTDGTRIHAFDKARDWTSRGKYTSPEPSLGYLLPANTAGDHSFNCVAHVYESRCGLSHGLGQTFASPEHGIDLVIINKRAPDVTENGGADILPMGFLPCSALHQPLRHVQLPHQADPKHGPFNSAWVATSIEDPFQSASNGVQFEFYMD

SEQ ID NO: 81610 - protein, 275 aa, Zea mays
  Coding DNA Sequence Number=SeqID_39831
  Subcellular localization annotation: CTP_CleavageSite=40; ConfidenceScore=5.17e-01
MHRQMLEAALVTVDLGTRGARPRPVGRPSAVASGRYLQVRACVVTGLSQDSRLAERSNSRDDLSGIVIRGTWITSLNVLNPEVATRHIPEDNKANRSDKTAVSSAFTNYDDVCLSTTAVVPPRHLPTTDGTRIHAFDKARDWTSRGKYTSPEPSLGYLLPANTAGDHSFNCVAHVYESRCGLSHGLGQTFASPEHGIDLVIINKRAPDVTENGGADILPMGFLPCSALHQPLRHVQLPHQADPKHGPFNSAWVATSIEDPFQSASNGVQFEFYMD

SEQ ID NO: 81611 - protein, 151 aa, Zea mays
  Coding DNA Sequence Number=SeqID_39832
MAVRQGEVAPPCAEVNRHQGCLEHLPAHLPHSLSCKEATSSSFDVAHGDGDAVNEDDVTKFGVVPGDGHAGVQDVVTKLAGDAAHGDGDAGCQDGVTKVAYGAAHGDGDVDCQDGVTKVTCGAIHGDGDAGCQDDAAKLAAEAMGSDRNPS

SEQ ID NO: 81612 - protein, 288 aa, Zea mays
  Coding DNA Sequence Number=SeqID_39833
  Gene Ontology: Mol. function=hydrolase activity; Biological process =cell division
  Homolog annotation: Hit_ID=Q84MV9; Match level="QueryCoverage=86%, HitCoverage=68%, E-value=7e-58, Identity=74%"; Hit description =Putative cell division control protein
MEMGTPVARMTPRNWQQKPWDQIKTQASRYQMLWSLDRCSVGMKKNLDQEIINFLLGRWTSLLLMPKHLMRVSYAALDQGITYQNYLTKETSDLLLSLLKPAMIMTNAQLSTPLLLGQLQRYICQFVVTILLLVFWPTNGLGSLPCMNTFMSFMRSVGAELLSRTKEKDDEDDGDYDMVFDAEGSMHLVKKAVAKTPSASSDSRPTGRGSVVARATAGRHRLEPDSSIRVDMGSEMTSEDGGKLARAGKSGARKVLQRLFRVIQSVLVIAALNAPLYMMLLFKDWIDR

SEQ ID NO: 81613 - protein, 311 aa, Zea mays
  Coding DNA Sequence Number=SeqID_39834
MEMEQRPEDYGSREGDGVDVGEIPERLRHGEPVEQRASDTASAMEHRPEDEGSRDREGDEVKYLRPVEAEARSTDAAMEQRLEAEGNREPRGRQDAAMEQRLEAEPPRGSGSGRETRRRRWSRDQAAAMEQRPGGGDTPGEAGRIGFSPIQSCPSRACPFNGLVLVPALWADLSAQARHGGRAGLARARILSCRAGFGPCQSVPGLVPPNGPAQYGHRVPPAAAPCPTRSSTRRPTRSSTPLPHTLEHAPPRGIRHRLRLFLDRGGERSAAPSVDLETAMKLQAHAPLKVWLRRSPQVATDLDADGGVGGL

SEQ ID NO: 81614 - protein, 290 aa, Zea mays
  Coding DNA Sequence Number=SeqID_39835
MSDDLVVPVHFEVGQELCFCLLDHLLLVLLELKLIVSRQASIHQATPVAEGAQNVRRPHPAVFCRPRLHPAPHHAIQRNSPAHTLEHAPCPTRSSTRRPGGSATASTSSSAVAVSAAPPPVDGGVGGLRRNPTDVLDHLKPHTIALLHLLYNRCPPLAPPPPYVKWVGIALAQLHLRARRVAARRGSGAGRSSRVVGSQVNLTDSSPYLLLLVWISALDEFQGSIAVAAAAMDKSPGAASHLRLSSLVNRDLVPISILVTQFASWVGHVRSGTMLQAKKMPLKKLKEEEG

SEQ ID NO: 81615 - protein, 89 aa, Zea mays
  Coding DNA Sequence Number=SeqID_39836
  Homolog annotation: Hit_ID=P26301; Match level="QueryCoverage=62%, HitCoverage=9%, E-value=2e-13, Identity=75%"; Hit description =Enolase 1
MAVTITWVKARQIFISRGNPTVEVQHFALPSLPGAVDVGLSDGSYARGAVPSGTSTVFRPVCKSLMSPVFYIWVSYGGTPALASDQFAQ

SEQ ID NO: 81616 - protein, 81 aa, Zea mays
  Coding DNA Sequence Number=SeqID_39837
  Gene Ontology: Mol. function=protein serine/threonine kinase activity; Cellular component=cytoplasm; Biological process=protein amino acid phosphorylation
  Homolog annotation: Hit_ID=Q6RK06; Match level="QueryCoverage=58%, HitCoverage=7%, E-value=1e-20, Identity=95%"; Hit description =Tousled-like kinase 2
MVARSGYKNLLIYGLGKRGMKLILGVSYNALNKYLPLECFDLSKTPFISSKVDVWSAGVIFYQMLYGRRPFGHDQTQERIL

SEQ ID NO: 81617 - protein, 133 aa, Zea mays
  Coding DNA Sequence Number=SeqID_39838
LRFPLSPSLGLGKRGMKLILGVSYNALNKYLPPECFDLSKTPFISSKAARRLKNHGRLGVHVAVQRLASPYRLKNTASSIAFKHDHKQFGMNQSSTYVATGAAGQPLNCMNEDSSDYKLATQQCGVATGNWQP

SEQ ID NO: 81618 - protein, 150 aa, Zea mays
  Coding DNA Sequence Number=SeqID_39839
  Homolog annotation: Hit_ID=Q10CU2; Match level="QueryCoverage=54%, HitCoverage=12%, E-value=6e-07, Identity=42%"; Hit description =Tousled-like kinase 2, putative, expressed
MVARSGYKTLLIYVKVPLSPSLGLGKRGMKLILGVSYNALNKYLPPECFDLSKTPFISSKVTGLLALKTGFGMFQLGGDSGENTSGRYNYQCTKSGVPLKKPAVSNEAKNQSSTYVATGAASQPLNCMNEDSSGKSVQSFMEVENLFTRV

SEQ ID NO: 81619 - protein, 289 aa, Zea mays
  Coding DNA Sequence Number=SeqID_39840
  Homolog annotation: Hit_ID=P26301; Match level="QueryCoverage=17%, HitCoverage=10%, E-value=1e-12, Identity=86%"; Hit description =Enolase 1
MDKSPGAASHLRPSSLVNRGIYEALELRDGGSDYLGKGVLKEKAVTITWVKARQIFISRGNPTVELRAGGRGPQRWQLREGGRTQRRIHWVIQSYLAELTIFFCPHTKNQFLILLDNRPWLLDQDTKPCSFMLRFPLSPTLGLGKRGMKLILGVSYNALNKYLPPECFDLSKTPFISSKLATGTGIAPFCLFLWNMFFEKHDHYKDSSCARELHKDGTSYSGFDLELDSLSWMRVTELLIPTHLHLEASDEPDQCEMYEDDSKSSSTPQMHTNSKASSQRYKSSRTDDE

SEQ ID NO: 81620 - protein, 192 aa, Zea mays
  Coding DNA Sequence Number=SeqID_39841
  Homolog annotation: Hit_ID=Q5JL31; Match level="QueryCoverage=39%, HitCoverage=14%, E-value=4e-08, Identity=45%"; Hit description =Putative DNA-binding protein
  Subcellular localization annotation: CTP_CleavageSite=64; ConfidenceScore=5.20e-01
MKAFEKFQYVDVLVPIVSFPLKYRCTSLLSMPSWATPIATTKRLGAASHSNKAKTNCTVLTLIRLATGTGIAPFCLFLWNMLFEKHDHYKDSSWKLLGALSEVMVRSGMNPTVSDQAILLDLIAKSRCVVAAKKYFLDLPETSKTYFRYHALLNSYSKVLMIEKAESLVEKMEELNFPFIFYMKRKVEHERN

SEQ ID NO: 81621 - protein, 252 aa, Zea mays
  Coding DNA Sequence Number=SeqID_39842
MVLKKELGANGHNLNRCDSVQEDEKLIDLAGSESSSAKTTGLATGTGIAPFCLFLWNMFFEKHDHYKDSSWKLLDALSEVMVRSGMNPTVSDQAILLDLIAKSRCVAAARKYFLDLPETSKTYFRHNVVNEHFLIVVPCCEVTITGLTNNSYFDGAHEVRHYVRKHSDLGRIVLEVAKVYNECHEGLLSLNPILCEILNICPKNNLRPELTNSPPSKLLENFSEVDMMKMIVLMPTQMMLMYLGNSTFFSAL

SEQ ID NO: 81622 - protein, 126 aa, Zea mays
  Coding DNA Sequence Number=SeqID_39843
MELLSKSYPTKEKTLKGMLVIWESRRRHYTETLFSCKSPARSQLNLFNPKTWYLAEGFKEGNRDQGSKQVRKILKTSREVANAPGLAFVNRENNKPRKIGFTILSFFYHFLKLFWLWSKKKKETDE

SEQ ID NO: 81623 - protein, 126 aa, Zea mays
  Coding DNA Sequence Number=SeqID_39844
MELLSKSYPTKEKTLKGMLVIWESRRRHYTETLFSCKSPARSQLNLFNPKTWYLGEGFKEGNQDQGSKQVRKILKTSREVANAPGLAFVNRENNKPRKIGFTILSFFYHFLKLFWLWSKKKKETDE

SEQ ID NO: 81624 - protein, 90 aa, Zea mays
  Coding DNA Sequence Number=SeqID_39845
MELLSKSYPTKEKTLKGMLVIWESRRRHYTETLFSCKSPARSQLNLFNPKTWYLGEGFKEGNQDQGSKQVRKILKTSREVANAPGLAFVN

SEQ ID NO: 81625 - protein, 126 aa, Zea mays
  Coding DNA Sequence Number=SeqID_39846
MELLSKSYPTKEKTLKGMLVIWESRRRHYTKTLFSCKSPARSQLNLFNPKTWYLAEGFKEGNQDQGSKQVRKILKTSREVANAPGLAFVNRENNKPRKIGFTILSFFYHFLKLFWLWSKKKKETDE

SEQ ID NO: 81626 - protein, 230 aa, Zea mays
  Coding DNA Sequence Number=SeqID_39847
MAEALAAMAGGNKLAGAKGKGLAGEGECGAKWGRAWEGFIGTARCTGGRGPASARGRALGRRGARTGVNQGCQPRSNTCSRCLCPCSSADWEQIFANLGKITARDLFTRPSFVFCVWTTCGFRLGTGSCSVTKVPVSECLVPRLSCAKTVSKEFGLSSNFPRMCSRKTLSDTGVSQPSPLKGISSRDSGQSPPGVKRRVRLIGKRVMIVIIRAKLLFECHSLCNFRRKSF

SEQ ID NO: 81627 - protein, 131 aa, Zea mays
  Coding DNA Sequence Number=SeqID_39848
  Subcellular localization annotation: CTP_CleavageSite=47; ConfidenceScore=5.34e-01
MAEALAAMAGGNKLAGAKGKGLARLGTGSCSVTKVPVSECLVPRLSCAKTVSNEFGLSSNFPRMCSRKTLSDTGVSQPSPLKGISSRDSGQSPPGVKRRVRLIGKRVMIVIIRAKLLFKCHSLCNFRRKSF

SEQ ID NO: 81628 - protein, 149 aa, Zea mays
  Coding DNA Sequence Number=SeqID_39849
  Gene Ontology: Mol. function=cytochrome-b5 reductase activity; Cellular component=cellulose and pectin-containing cell wall; Biological process=electron transport
  Homolog annotation: Hit_ID=Q9ZPN0; Match level="QueryCoverage=55%, HitCoverage=29%, E-value=1e-44, Identity=100%"; Hit description =Cytochrome b5 reductase
  Pfam annotation: Domain name=NAD_binding_1; Domain location=37-134; Score=30.8; E_value=2.2e-06; Accession=PF00175.11; Description =Oxidoreductase NAD-binding domain
MGPRPRVCLFDYESVRQVLFNKSGHFFKDDAHPTILAMLGKGLVLVEGTDWVRHRRVVNPAFGMDKLKDELDDMAKTYPGRFKIYYVLNQPPENWNGGVGFVSKEMIQSHCPAPAEDIQILRCGPPPMNKAMAAHLDELNYTKEMQFQF

SEQ ID NO: 81629 - protein, 226 aa, Zea mays
  Coding DNA Sequence Number=SeqID_39850
  Homolog annotation: Hit_ID=Q94JJ0; Match level="QueryCoverage=39%, HitCoverage=22%, E-value=4e-37, Identity=85%"; Hit description =Putative plastidic aldolase
  Pfam annotation: Domain name=Glycolytic; Domain location=32-226; Score=-115.3; E_value=4.8e-07; Accession=PF00274.9; Description =Fructose-bisphosphate aldolase class-I
MDHIQPKNTPHNEPLPLVFLLVQPPENWNSGVGFVSKEMIQSHCPAPAEYIQTVTSEAVSEVVQSSVSVAVDAVDLVDDKGDSDDDIVDHHGDEDRMTDVELWQQLESELYRKREGEEDDIAEEMAESTIAEEDNGLVPIVEPEILLDGDHGIERTLEVAEKVWSEVFFYLAQNNVLFEGILLKPSMVTPGADHKEKASPEAIAKHTLTMLKRIPSGCVLHVARDD

SEQ ID NO: 81630 - protein, 194 aa, Zea mays
  Coding DNA Sequence Number=SeqID_39851
  Gene Ontology: Mol. function=hydrolase activity
  Homolog annotation: Hit_ID=Q10SN6; Match level="QueryCoverage=82%, HitCoverage=47%, E-value=6e-47, Identity=59%"; Hit description =Hydrolase, alpha/beta fold family protein, expressed
MWVTSMPQVWDEEGAAKGGAVTPAPAAAMLGSLAGWLSRTVQPQPPAPRVCGTAGGPPVTAPRLRLRDGRHLAYCESGVPRDQARFAVVFSHGFTGSREDSVRASQGRWTATSVYCLSTCNAKLEFGELQLVSYTGSLPLARRLSVGCHFHSQAADGALRRDAVIAASDADWAVGGPSRISPGNASRIFLPLAH

SEQ ID NO: 81631 - protein, 185 aa, Zea mays
  Coding DNA Sequence Number=SeqID_39852
  Gene Ontology: Mol. function=cysteine-type endopeptidase activity; Biological process=proteolysis
  Homolog annotation: Hit_ID=Q10SN6; Match level="QueryCoverage=23%, HitCoverage=12%, E-value=2e-15, Identity=88%"; Hit description =Hydrolase, alpha/beta fold family protein, expressed
MVRPILQPILRRLPSTPQATAPAASTPATARAGCPRPRPPPHDHDHGLNRSASSAIYAHDFNLVRLRLRDGRHLAYCESGVPRDQARFAVVFSHGFTGSREDSVSASQGRFSFLMLRNYGLLFWQTLMTVAMRPLPVPSEVWSDISMDFVEGFPEVGDWRDHGAVTAVKDQQQCGSCWAFSAVGA

SEQ ID NO: 81632 - protein, 131 aa, Zea mays
  Coding DNA Sequence Number=SeqID_39853
MGKHVPSLLMLLLGRVQYNGSSSLISCEKQMIQIEFLNLARAHRLGVQCLTDPDCRHAVTALVPTITGMGDHVSGCVRGYVCGQVQSGIHTLILIPISSRRPRIPMDLCPQTNYQYDMKVGTINVLTSREC

SEQ ID NO: 81633 - protein, 63 aa, Zea mays
  Coding DNA Sequence Number=SeqID_39854
MGDHVSGRLRGYVCEQVQSGIRTLILIPISSRRPRIPMDPCPQTNYQYDMKVGTINVLTSREC

SEQ ID NO: 81634 - protein, 124 aa, Zea mays
  Coding DNA Sequence Number=SeqID_39855
MPSSSSSATATPPAAASSEETLSNAMVEELRAGDSVEFGVSRMTSGRIEDMQRLGYFGGGVARAPGTEEVPEPEGELVVFEAFFAAGLRLPAHRTKQTAAGRNRRWRPGGDPALAAATSSKKRN

SEQ ID NO: 81635 - protein, 255 aa, Zea mays
  Coding DNA Sequence Number=SeqID_39856
  Subcellular localization annotation: CTP_CleavageSite=82; ConfidenceScore=5.00e-01
MMRQQEKNKASQQEVAITVAVEENRQLPMERMPRRRSTSTTNSSRHRWSPCLTMPTKAPTRVNGAATTLFPAWTVVQRENPRGGEERRRARCDWMLLAKRGRDGSREALREGSYGRLVARGDDSWILTRHARVDGNPAAAAPDFSVEEDACGGVRLTEGARVEVSVVSEREGLRGGPTGKPNQVCSFYDANEAHKMEEISPIFLVYNFEYYSQNGKEIRTGQCPVVHRTVRCASRQKARIAFLECSQRLLATLGL

SEQ ID NO: 81636 - protein, 153 aa, Zea mays
  Coding DNA Sequence Number=SeqID_39857
MPNYPAQMMRQHEKNKASQQEVAITVAVEENRQLPMERMPRRRSTSTTNSSRRWWSPCLTMPTKAPTRVNGAATTLFPAWTVVQRENPRGGEERRRARCDWMLLAKRGRDGSREALREGSYGRLVARGDDSWILTRHARVDGNPAAAAPGFFC

SEQ ID NO: 81637 - protein, 398 aa, Zea mays
  Coding DNA Sequence Number=SeqID_39858
MKQFFFFSAADESKFLFNDPYPFIGFERVFGFDEKWGTGDRSSARFIEGGGLKRSNSSPSASPAVPEVHLQVVNGCAKLIHTGSSFGFLISDGVVIAAAALLMSRSQLRTFYTLHSSTWSYKIVGVHPFSAYSVSHNNLRPETEEGELSPNGDFKEEHFCVFEDEAIDGTSKQNEGSTSRSPQGRPKNYLKFSGKDHSSAENESNKRAQRSAEDSENASEADEDTSGRESDGDEESSHEDQDEEEDDMDLDTKAKNDCRAEVNREAQGLDGGTSMSFSECLQSIVKPISKFISALYNLLDGSSEEEPAAEKTTTGKKPKAEKRVLAGKSAGKEDGEGKRGRKKGKKSVETSHPHLSSSSRHSIEVEGVEQFRGRSWGIAGRVGAAVEVVARGGGEPWH

SEQ ID NO: 81638 - protein, 116 aa, Zea mays
  Coding DNA Sequence Number=SeqID_39859
MAMMGSTSEKMYLCQDRADVRLLTEDPLTGHMPRHGFNCQRCVDSPAVGEIKAGGHLSLKPVIEASHKTIPLFQHSFWNVVLTKRQFKFVPSDEPKFLLNDSNPFIGFERIFGFDE

SEQ ID NO: 81639 - protein, 169 aa, Zea mays
  Coding DNA Sequence Number=SeqID_39860
MELSEEPKGWIARPITCDAANGCNFHDALDSLLRQAFDRHTWSTEYRCVVYQHHRGLYPDRGVADGLDLKYYPRRLTGSAGGVIVSPVGEGNPRLNSMVNLVTMLNAELDHALDELGKMSENRRRGGRRAQEEQQAPQEEAAQHQLPPPPPMTIEQIFLMQTQAVQAIV

SEQ ID NO: 81640 - protein, 61 aa, Zea mays
  Coding DNA Sequence Number=SeqID_39861
  Subcellular localization annotation: CTP_CleavageSite=31; ConfidenceScore=5.35e-01
PSETGRFPVVSDDVAPSPSPASGKSASAKAKAQEKSSSYRVGGARCLPLVAVSSAGLTLLW

SEQ ID NO: 81641 - protein, 433 aa, Zea mays
  Coding DNA Sequence Number=SeqID_39862
  Homolog annotation: Hit_ID=Q06I96; Match level="QueryCoverage=26%, HitCoverage=47%, E-value=2e-25, Identity=62%"; Hit description =Fasciclin-like protein FLA10
MEQERGTRRGAQQGRSPDEAEGSSILTRTGTRGSSLVASRRAAEGRAHEGGRGVGRSTPPAVGIAATKADMRLCGAITEEHAATAWATQRQARRRRRGVPRRRDRMEQASTTVCLGRWGRKEAQRAARPPPACAFGGGAADRTGRARDIGEVAVGTIRRSSSPPRELAGCRAVEPGRREITIREHEEESPCVSTTTARPFHPRPCPRPRPCHLDLAEVPHVLQKTDVIERTARSKVSPSSCPRTRLSRRSAGRRRWATSAPVAAPVPRAAQVHSLAEFDRLSSHGPAATLNLTYDIGTVRVKSAWSGPKISSSVYSTRPAAVYEVSQVLLPVQIFKSDSPLAPAPSPAPAPDAKVSDDVAPSPASGKSASAKAKAQEKSSSYRVGGARCLPLVAVSSAGLTLLCDDLSFSACDCLASDLRHQFLPRQASGIRN

SEQ ID NO: 81642 - protein, 181 aa, Zea mays
  Coding DNA Sequence Number=SeqID_39863
  Homolog annotation: Hit_ID=Q9SSX1; Match level="QueryCoverage=18%, HitCoverage=12%, E-value=1e-07, Identity=73%"; Hit description=OSEYA1
MSFLENEMNILFDLMCAYGPFHRIHWATYIAERPSCEEVLVLLEENSFVMGLEKVLDGHMVKVCNDQYSLTDKYTDGWLSSVLGTTILTLMYPAAFTWFTTRCEDQVGEQLMGQEADCLEEESIAHPTYIIGQIVLIEQHTRLLGQMRGASHPDSSGGHRAPASMLIPYILPGGCEYQGAP

SEQ ID NO: 81643 - protein, 129 aa, Zea mays
  Coding DNA Sequence Number=SeqID_39864
  Gene Ontology: Mol. function=DNA ligase (ATP) activity; Biological process=DNA recombination
  Homolog annotation: Hit_ID=Q8W5J3; Match level="QueryCoverage=50%, HitCoverage=11%, E-value=3e-11, Identity=47%"; Hit description =Putative DNA ligase
  Pfam annotation: Domain name=DNA_ligase_A_N; Domain location=13-129; Score=-47.5; E_value=0.0025; Accession=PF04675.5; Description=DNA ligase N terminus
MDSRKQKEHPGGFLFTKFASSSQILFDLFLGLEKVLDGHMVKVCSDQYSLTDKYTDGWLSSANRIVPPHEGIELGIGDASVICALAEAYGRKEEHVKKDLKELGDLGLLAKASRNQESGKDSQDKKETI

SEQ ID NO: 81644 - protein, 349 aa, Zea mays
  Coding DNA Sequence Number=SeqID_39865
  Gene Ontology: Mol. function=DNA-directed DNA polymerase activity; Cellular component=nucleoplasm; Biological process=DNA repair
  Homolog annotation: Hit_ID=Q5JLR9; Match level="QueryCoverage=74%, HitCoverage=40%, E-value=1e-116, Identity=82%"; Hit description =Putative DNA polymerase
  Pfam annotation: Domain name=IMS; Domain location=76-349; Score=6.2; E_value=5.9e-10; Accession=PF00817.11; Description=impBmucBsamB family
MAAAIFQCLKKFYDLTELLFGDITPPTGIRQAMEMQAEVERRICAQFDHLLYCSRAAEEPGAQGTANRRGAVQWLERRRLDCRQLRGSWIWSMRGDEAKRVCPGINLVQVPVARGKANLNLYRSAGAEVVAILASKGKCERASIDEVYLDLTDAAKEMLLQAPPDSPEGIFMEATKSNILGLPADASEKEKNVRAWLCQSEADYQDKLLACGAIIVAQLRVRVLEETQFTCSAGIAHNKMLAKLVSGMYKPAQQTVVPSSSVQDLLASLPVKKMKQLGGKLGSSLQDDLGVETIGDLLSFTEEKLQEQYGGLEKVLDGHMVKVCNDQYSLTDKYTDGWLSSDCRTTLFK

SEQ ID NO: 81645 - protein, 457 aa, Zea mays
  Coding DNA Sequence Number=SeqID_39866
  Gene Ontology: Mol. function=DNA-directed DNA polymerase activity; Cellular component=nucleoplasm; Biological process=DNA repair
  Homolog annotation: Hit_ID=Q5JLR9; Match level="QueryCoverage=56%, HitCoverage=40%, E-value=1e-116, Identity=82%"; Hit description =Putative DNA polymerase
  Pfam annotation: Domain name=IMS; Domain location=184-457; Score=6.2; E_value=5.9e-10; Accession=PF00817.11; Description=impBmucBsamB family
MTESTGTATKSTVGGAAGDPLEAGSVIGDLEAWAAAGVSVEAAGVKHWPPSAARQQPTGGTVQLSILYLHALQRDLYGPSKYTRHLQATKDTLRQEDRKISPSDDDWDMAAAIFQCLKKFYDLTELLFGDITPPTGIRQAMEMQAEVERRICAQFDHLLYCSRAAEEPGAQGTANRRGAVQWLERRRLDCRQLRGSWIWSMRGDEAKRVCPGINLVQVPVARGKANLNLYRSAGAEVVAILASKGKCERASIDEVYLDLTDAAKEMLLQAPPDSPEGIFMEATKSNILGLPADASEKEKNVRAWLCQSEADYQDKLLACGAIIVAQLRVRVLEETQFTCSAGIAHNKMLAKLVSGMYKPAQQTVVPSSSVQDLLASLPVKKMKQLGGKLGSSLQDDLGVETIGDLLSFTEEKLQEQYGGLEKVLDGHMVKVCNDQYSLTDKYTDGWLSSDCRTTLFK

SEQ ID NO: 81646 - protein, 152 aa, Zea mays
  Coding DNA Sequence Number=SeqID_39867
  Homolog annotation: Hit_ID=Q6QP51; Match level="QueryCoverage=36%, HitCoverage=32%, E-value=3e-07, Identity=49%"; Hit description =Putative growth-regulating factor 1
MDTARNARRPRRARYGGPDRTWASELDEATLWDDVVAGLRLVPIKRRVSLPVLSLSDQRLQRRLRAKGGVFAFAPTPGSGGAEFAVFQGLARIRALGRPERSFLWCLRSGLTACQPHSVKWHCSRCGAGGAVLLSGRSVERRSDCGHFGSVD

SEQ ID NO: 81647 - protein, 180 aa, Zea mays
  Coding DNA Sequence Number=SeqID_39868
MRSPYLTMDNVVQPLWTASKWRLRWSLSYTVTHVAHVGRLPDVKLGAAKLLLVVDERCQHERLLLSVFVQVFQARNARRPRRARYDGPDRTWASELDEGALWDDVVAGLRLVPIKRRVSLPVLSLSDQRLQRRLRAKGGVFAFAPTFALRGTSLTKSPGAEDVARWRRRCPRSKWFRGGF

SEQ ID NO: 81648 - protein, 497 aa, Zea mays
  Coding DNA Sequence Number=SeqID_39869
  Gene Ontology: Mol. function=cysteine-type peptidase activity; Biological process=proteolysis
  Homolog annotation: Hit_ID=Q53MK8; Match level="QueryCoverage=51%, HitCoverage=27%, E-value=1e-23, Identity=27%"; Hit description=Ulp1 protease family, C-terminal catalytic domain, putative
MKSVDRPPANPKRITIESSQEFFSVEIPRPASIGVPTNTKHSDPCPAPVEKPSVIYEANEQTGSGNDDDDFMTPTKKRNAAGSHMNILRKTCTKRPKVVETPRQKLNVRCNPQDVIITIKILNERQRQAVARKGFSNILDMTLDALGSRSHLRWLMDKLDHKDMTIRPGVGKELKITKETVHLILGLPNAGGGKPLGIDEAVAGNNLRAELGLSKDEFVVASLQDRLRKGNDDDLSIRCFFLILFNRLLFPTSSWGISNHEVLLTEEMDRFHEIDWCHLIFNDLCEAAQKWHTRSTSNVSTTIYGCSVVILFRSFSETCYSAVPSVQFQSEHRDRTNIFDVPRPDPCGHHTIHIQLPLIKDMLSSKIKQLQPRDRPKFIEKFVEYDSEVGKACSIIKSTLTKMVVKQYELADTFAELIDDVLRAESGDPDNVAEAPQTDKPPDISQHMSSEEQVLALHYLTFHSKNKVPPVASRNSKIQVWTLAVSLGSTFCESQTV

SEQ ID NO: 81649 - protein, 113 aa, Zea mays
  Coding DNA Sequence Number=SeqID_39870
MQNRGMSIIKDGAKVRIVTDRERMQPRSGQNLQGVEEGGAIDDEIDEALSPNRDGKEDASKGRFKVRYRGDKDKGDNDEKRNPWIELRRDSQSEEMEKTIKDKISEVPIEELK

SEQ ID NO: 81650 - protein, 137 aa, Zea mays
  Coding DNA Sequence Number=SeqID_39871
MHDRGMSIIKDEAKARIVTGKGENATKVRIGKTPFSNRDGKDDISKGIEEGGAIDDEIDEALSPNTDGKEEASKGRFKVTRGKEEDIAKGEVSKTPLSNWDRRLEILDNRHHVITKVWSRDGKGKGNTKQKYNKGWS

SEQ ID NO: 81651 - protein, 83 aa, Zea mays
  Coding DNA Sequence Number=SeqID_39872
MARARISRVDDVEAAKSVESTRSEDHEQSHEDASQKPYSPSPGAGSRRRRVLETCSPDRRCTSAVGMKRTGRRLSCEERRKRN

SEQ ID NO: 81652 - protein, 158 aa, Zea mays
  Coding DNA Sequence Number=SeqID_39873
MERAGISRVDDVEAAKSAGSTRCTSAVGMKGTGRRLSYEERRKRNWDELDAGCQAPFIGPTHKSFTSDAERRACPAAFTHTSTSAMAIGNERTSRFASALFPVDLTRRSVVVLWLCFCACGGPLRETSSYSRRGTATVIGTAVVSCSPLQRRRRCAFG

SEQ ID NO: 81653 - protein, 491 aa, Zea mays
  Coding DNA Sequence Number=SeqID_39874
  Homolog annotation: Hit_ID=Q6QP54; Match level="QueryCoverage=29%, HitCoverage=44%, E-value=5e-27, Identity=53%"; Hit description =Putative kinase
MAERYQLPQSCVLQRQGGRTAGVPHPGARKPSWAESSPTRSKVLPLRRGGWVPCVVQAGPEQKKPNRRARCMQPPSSYEHSSTFAQTSGRKGGKPCRRHATAPSRRAPPTSNAPSMGAHAHASRSRRAGRYVQTTAPPLAPLPRLLDCGTSTATRGNPAYDPAVPAKRDGQYGHKWAGSNGGGRRAGAAFASSAKLTSHPGAVKEPSITTGSERRFAFAIMTASKEGPGKGDTSKRILLREGNRLRASLLIRGSKAGPSEGFNSRLRARGFCAHYWSEVRRLAPRKGSTAASGYSGSAPTTDQGARTRAQPRKTVNSAPPDPGLGLGLSPERRARTRAQPRKTANSAPPDPGLGLGLSPERRRTPLRPTQGSDSGSAPEDDELRFARPQGSDSALGLRRRSPPRLTQGLGLDLGLGRQTRPRPQRSLHIAQPKARTDHVNRRRHHYPTPSRLRLRGTRLASHLARSARQVMMAPRTLYDDGGSQPPYGSKR

SEQ ID NO: 81654 - protein, 317 aa, Zea mays
  Coding DNA Sequence Number=SeqID_39875
  Gene Ontology: Mol. function=DNA binding
  Homolog annotation: Hit_ID=Q9LGH0; Match level="QueryCoverage=77%, HitCoverage=79%, E-value=6e-19, Identity=25%"; Hit description=NAM -like protein-like
MGTDWNQVMAQYGSFLSEDDGTQFDNTAFPPPPDIPAQASPAAPPVKKPPQRTKLANFTSEADMRVCQAWLAMSCDPIVNTGQKRQGFWNRITEAYNSHRGSMPESGMTDADKTSLAATRFAAVEKKPFHFLHCWSILKDQPKWMDQHMGNQNPPPNPIGTQSNTIDLDAAEDSGPSSFTSKRPLGRDSAKEKEKKQRSENTSSNDSEYLTQMGELSLERLSVYKSVASTEEKKLEFMKKQERQKLILERKKLNLEKMKMERQKVKEDTEQEVLILSIDLTKCNPLLRQYYEAKQHEILARVTGSSSSSDSRLEGGE

SEQ ID NO: 81655 - protein, 276 aa, Zea mays
  Coding DNA Sequence Number=SeqID_39876
  Subcellular localization annotation: CTP_CleavageSite=92; ConfidenceScore=5.32e-01
MTSLGSETDDPDFTRSRTTVGRRSTIRRSRPNAAKGRSGDDDGGSAAASRSSARNCATSSGRLRPRTTRHPSNRLGDAPRPVTGDPTSTTTRFGHGGELGPRKSRRCGWREVANTGEDGKGSRSFGFIPKERPAAVARRPRIHGELCGVRAARSAKLLKAGLTRGPRGPERGRAGERGARDRPVGPESDKWAQVVGARDRSEWAARGASPEIKEGVSARNLRMAHRIARSTRGRGRPKSGEDDLGFPVKFCQVRELGKLHGPQAKLTEGQAQLGRG

SEQ ID NO: 81656 - protein, 206 aa, Zea mays
  Coding DNA Sequence Number=SeqID_39877
  Subcellular localization annotation: CTP_CleavageSite=92; ConfidenceScore=5.32e-01
MTSLGSETDDPDFTRSRTTVGRRSTIRRSRPNAAKGRSGDDDGGSAAASRSSARNCATSSGRLRPRTTRHPSNRLGDAPRPVTGDPTSTTTRFGHGGELGPRKSRRCGWREVANTGEDGKGSRSFGFIPKERPAAVARRPRIHGELCGVRAARSAKLLKAGLTRGPRGPERGRAGERGARDRPVGPESDKWAQVVGARDRSEWAAR

SEQ ID NO: 81657 - protein, 68 aa, Zea mays
  Coding DNA Sequence Number=SeqID_39878
MPVPSRCQNPYSLLLCTRCRPALGSLQHVSAQRCCSMMRVLLAEILVHDPAKRPVVVRHLFASLPLSK

SEQ ID NO: 81658 - protein, 163 aa, Zea mays
  Coding DNA Sequence Number=SeqID_39879
VGVGGERHSRWSLAGDGNDAASRCSTSVGSPNDKRRQRHTQAMTRISGEQQQGAWRGHGRGSPRAARSSWSNGAEQRHAAANPAQGDNGCTTARSRDFGNGLALASWLRHRHSEGSSSVRESSEMGGLRDRNNKEWREEEDEHENDNHCWRGGMEKNGLMHVL

SEQ ID NO: 81659 - protein, 81 aa, Zea mays
  Coding DNA Sequence Number=SeqID_39880
MKKIDEEVQRQKDQVLKVADKWFLSHFRVDCHQKTVQEREIDVDYMSSVLQQLPTIGDARSDRPEHQKSPVIRLVRKADIK

SEQ ID NO: 81660 - protein, 157 aa, Zea mays
  Coding DNA Sequence Number=SeqID_39881
  Subcellular localization annotation: CTP_CleavageSite=17; ConfidenceScore=5.08e-01
MAVDQGIAHFLVLAAVFASLSAGPVRMLLTMSQNKAVSEKSPQKGTNILFGDSAGDEVQDLQNQAYMADSKDLNKASPNSCTRLTNLSAAEHKRLKDDMKKIDEEVQRQKDQVLKVADKWFLSHFRVDCHQKTVQERKIDVDYMSSVLQQLPTIGDA

SEQ ID NO: 81661 - protein, 93 aa, Zea mays
  Coding DNA Sequence Number=SeqID_39882
MGHHHISRSYFRQTDIKRSGNASIDIMSKFFKLMVVLQLMNDLNEVFKMPLSLVLRLIVCLRFFDLSIIPLRYWNKSLPPRLPQCRQVSPLQQ

SEQ ID NO: 81662 - protein, 278 aa, Zea mays
  Coding DNA Sequence Number=SeqID_39883
  Homolog annotation: Hit_ID=P42211; Match level="QueryCoverage=25%, HitCoverage=14%, E-value=1e-31, Identity=88%"; Hit description =Aspartic proteinase precursor
  Pfam annotation: Domain name=Asp; Domain location=19-228; Score= -200.4; E_value=0.091; Accession=PF00026.14; Description=Eukaryotic aspartyl protease
  Subcellular localization annotation: CTP_CleavageSite=51; ConfidenceScore=5.32e-01
MAGRTAPASLPSFSLTPDSLAAPLSWISSWTLPRPTIDIMSKFFKLMVVLQLMNDVNRSVQDAAISCIEAYSVLEVLRPLYNSPKILEQKFSKIFTNHYIVQHWAVNIFCTMCHKHERLPVEYRCFIAVFLLVCPNVGKSALFNRIIASLRANQFCERLPSPNGESIVDCHQISKMPNLAFTIANKIFTLTPEQYIVKLEQAGQTICISGFMAFDVPPPRGPLCYAEHICTTLKCAMRASTEGITVPPLAPSTPVHVCVRPLRLPAMDASLPHVYNDN

SEQ ID NO: 81663 - protein, 153 aa, Zea mays
  Coding DNA Sequence Number=SeqID_39884
MVHRSYSSPPEALSPPFSRLCSWIHGLFPAIEFAVAPSPSLPNSSDPGATLARATVNSGDLTAAERNSAACSRLFSPWSDPLRPIQIERLRSRITLRARTPDALARLSAPKPPCAGPARSALSPPLSRGSFLKETLGLLEINPPSLVFTRRPL

SEQ ID NO: 81664 - protein, 207 aa, Zea mays
  Coding DNA Sequence Number=SeqID_39885
STETAPSLPELHPEVRHPSPCPISPIAPCVRPISLSPVLGRCGLSALSPLPVAGMVHRSYSSPPEALSPPFSRLCSWIHGLFPAIEFAVAPSPSLPNSSDPGATLARATVNSGDLTAAERNSAACSRLFSPWSDPLRPIQIERLRSRITLRARTPDALARLSAPKPPCAGPARSALSPPLSRGSFLKETLGLLEINPPSLVFTRRPL

SEQ ID NO: 81665 - protein, 339 aa, Zea mays
  Coding DNA Sequence Number=SeqID_39886
  Subcellular localization annotation: CTP_CleavageSite=37; ConfidenceScore=5.01e-01
MVSQAGAAGSCAGSPRVAVLVPQPKRRDDGASGGAVACMQHPARRLRDAWAWASRLGALGVGEARPLGAVACRLHGCPPLSPVGLGKSGGSLVTAGRLSAPRAAVWLLLLQVGLHDMRDPAPAPQGRALERVGEDSARDGWGRKQGELPLKGGRPLSEGDHVFSLPYASRLSTFQAPGWGIPTVFSPHRWRNATPWELVPFSHRSASRIFIMQPGCTPPPAVTQDGDLQLDDGGKRAGLRPLSLPQPQGFSSSRPRWRMRRVGGLPPRGSVTLFFPWRLGENGILQLRGDFLQPCRDRWAVLARAKTCRRASRRRQPEMASLPMRLPTPPVALGLRLPT

SEQ ID NO: 81666 - protein, 79 aa, Zea mays
  Coding DNA Sequence Number=SeqID_39887
MASSDFAETSSSHAEKGGPPPPALTVAMITPAPGDEAASAAASGQVLRQKDSHPPRTRASHSSRETETQGYWRSWQSHR

SEQ ID NO: 81667 - protein, 134 aa, Zea mays
  Coding DNA Sequence Number=SeqID_39888
  Homolog annotation: Hit_ID=Q67XZ1; Match level="QueryCoverage=45%, HitCoverage=50%, E-value=2e-24, Identity=90%"; Hit description=DNA -directed RNA polymerase II second largest chain
  Subcellular localization annotation: CTP_CleavageSite=79; ConfidenceScore=5.82e-01
MTSTRMGWTWATAGITSAAAATRGTARRRTTRWGMARGVGTGTRWRRRRMGTPSSRKISRRTTPGAVISAYFEEKGLVRQQLDSFDEFIQNTMQEIVDESADIEIRPESQHNPGRQAEFAEVVAPLLLTVASVA

SEQ ID NO: 81668 - protein, 136 aa, Zea mays
  Coding DNA Sequence Number=SeqID_39889
  Gene Ontology: Mol. function=DNA-directed RNA polymerase activity; Biological process=transcription
  Homolog annotation: Hit_ID=Q67XZ1; Match level="QueryCoverage=50%, HitCoverage=55%, E-value=8e-29, Identity=89%"; Hit description=DNA -directed RNA polymerase II second largest chain
MEDDEYEDGMDMGYGGHHQRGGGHAGYGAEEDDEMGYGEGGGDGDEMEEEADGDAEQQEDITQDDAWAVISAYFEEKGLVRQQLDSFDEFIQNTMQEIVDESADIEIRPESQHNPGRQAEFAEVVAPLLLTVASVA

SEQ ID NO: 81669 - protein, 309 aa, Zea mays
  Coding DNA Sequence Number=SeqID_39890
  Homolog annotation: Hit_ID=Q10PJ5; Match level="QueryCoverage=42%, HitCoverage=16%, E-value=2e-31, Identity=56%"; Hit description=ANT, putative, expressed
  Pfam annotation: Domain name=AP2; Domain location=184-218; Score= -9.4; E_value=0.0063; Accession=PF00847.10; Description=AP2 domain
MDQLRGNVAKARKVLGSKGKGKGFARRWCSRAACNGSISEYHKCLARKICTFLVQIGSMTLKEETGIDLDDVCCLLQTALVGRSMLILLDDVWEQDIVDRFTRLYDNDCRYLVTTRDEAIYEIAEAEKVEICKDDIKEISTEILLYHSLLSAGELPLNLQQMLSRAAFSRSVNRKGYLFYLVIRWLRHRRQGSEGYDLAALKYWGPATHVNFPVENYRDELEEMKGMTRQEFVAHLRRRSSGFSRGASIYRGVMRFVCTDYYATAFCFLRDRLNRHHQHGRWQSRIGSVAGNKDLYLGTFSKKDRSIWL

SEQ ID NO: 81670 - protein, 167 aa, Zea mays
  Coding DNA Sequence Number=SeqID_39891
  Gene Ontology: Mol. function=ATP binding; Biological process=defense response
MDQLRGNVAKARKVLGSKGKGKGFARRWCSRAACNGSISEYHKCLARKICTFLVQIGSMTLKEETGIDLDDVCCLLQTALVGRRKLILLDDVWEQDIVDRFTRLYDNDCRYIVTTRDEAIYEIAEAEKVEICKDDIKEISTEILLYHSLLSAGELPLNLQQMVSVAT

SEQ ID NO: 81671 - protein, 242 aa, Zea mays
  Coding DNA Sequence Number=SeqID_39892
  Gene Ontology: Mol. function=ATP binding; Biological process=defense response
  Subcellular localization annotation: CTP_CleavageSite=42; ConfidenceScore=5.48e-01
MKINSSSSLSFSYSLLSYPHVATPPTVAHVREGSTIASGKTSASPEQGSNLNNRRKGIPTSPDIGMLTQPVRKLLPIPKPCYNNYGMGDPSPGGSGVLEDFVSDLDALTQQSRQRHTHKLHGPQLDHQFQSLGRLMDQLHGNVAKARKVLGSKGKGKGFARLVWSSVVGDSLIKYARLIRDDLNQWLELQELTQSIGNVIASTARSTPSLVRVKSEHGYRCPRSAAMSGSCWRGMGLIESSS

SEQ ID NO: 81672 - protein, 170 aa, Zea mays
  Coding DNA Sequence Number=SeqID_39893
MSGDVGIPFLRLLRLEPCSGEAEVFPEAMVEPSLTCATVGGVATCRIHCGAGPRKNDLTIYWALGPFVRSFTLLVDPGDIYPPQAPDLWVYLELRAGLLILSHALEVGTVLAWNDNPWGAPEVHPMGVAPDLQMDFRGNWHEAIRIMLWRSALCHQYFASEVFTACPAQM

SEQ ID NO: 81673 - protein, 113 aa, Zea mays
  Coding DNA Sequence Number=SeqID_39894
MSGKMPGADFIPHATWDWVSHASYGGYKCGHCTAAAGVSGALYAKAVRPGRERGIDGDGCHVWGRSTLTCRVFRFTLQGTIQEMVDGVTCPTTLPPGWTVEWDVAPAGEEHEE

SEQ ID NO: 81674 - protein, 81 aa, Zea mays
  Coding DNA Sequence Number=SeqID_39895
MAAAGVSGALYAKAVRPGRERGIDGDGCHVWGRSTLTCHVFRFTLQGTIQEMVDGVTWPTTLPPGWTVEWDVAPAGEEHEE

SEQ ID NO: 81675 - protein, 874 aa, Zea mays
  Coding DNA Sequence Number=SeqID_39896
MVALSKYVWATTSYGGQSSVEVFAKYYCLHWQKRMIGDEVAQFGSSYPPFEVAEDDADEGALRCAAGLSSGRDLVEEFVAYGVWPLAHGWALGEVCPRQMPSHGGKMVRSPAFALNLQNRDPAAFVREAEDGAVRLVGRYVPRTEVQRNWDIRGSNDRLIRVFELNQLPYDGYPGQDDVDRRGKKPVVETRDVPAPAAAPSSKKRKFGTAMGGLGVSVGFARELMRTCTAPVGRMSSPELRESSARMLRVTGGWWPRNVPIPRTAGEDFFTSRMVREWRVFPYGRNIAAVVSAVMDKDRQRAAQKRQVVVRLVEARPKRQRGAAKAAAPGGGKPPLAAKSGVPASSKAPEAAAGAGGSDEGQLAIVAPAAATTTAAVVPKAKGGALSAGGEMLALAAVRDEAGAVSRRLKEAADFADRTASGALTAVVSAEVERLRTQHADAVREKLAADSKCRKLADKVATLEREKTDLRRQLVGERMETNEALAQAQAAQAEANLARAEGNLARERAEQLQERLTALESRVERAEAASRAEAERTRKQLMDSYHELGARTGDFEEELQALPTIVEGFMSYASLVTCEGAMNALSREGCRHFEVFDQADEDFEREIYKVEDPIVKDSARAIYDRMWGPHGREVVRERAETARAQAARGERVDDFGALNSVLPDLEPIPAEAVSGAALEPLPETAEGAPDAPATAAAVGDLPPETAEGAPDAPATAVSSAEDPATVAAEATAEATAEATAEAPATTGSLQVQDFGPAHATATTKFLAASTVDGGNKCDGSAFEFSDFADSGSSVEWTEESSEEDLDYFAALDVAAAEALPHAADTEDVPGPSTGRRRRRAVAKRRVSEAQGGEELRIMLFNYREMGIIPKVEPM

SEQ ID NO: 81676 - protein, 406 aa, Zea mays
  Coding DNA Sequence Number=SeqID_39897
MESHDLRAEWESRLVGYIGLITWVMLKLGFLLVVSIATTAQAKMKLWKETSRSSKTTTSSRCGLAATPSRLPVKAAMARLRHTARKSVIPFLPSRLAERPLRRPVAGQSSHLERLHHRLHEEQQGSSFSLHQEIESVRSCSPVLPLEAPPAPPLGVPASGVAAGGDLDDGGGDDSSSHDTDFSANPEPEGWVARPITRDAARGCHFHDALDTLLRRAFDRHTWSVEYRCVVYQHSRGVYPDRWEATCLVRCPENSLQGAEVCSEHYSISERDSAEAAMQDAARRALSHYCSVFGGAADGLDLKYYPRRSSGSTGGVIVSPVGEGNPRLNSTVNLAAVLNTELDHALDELSRARAEIALLRAERAERRHLDGGSPAPVGTQHPYRSPQRGHQSYGNPDCKTKITLEP

SEQ ID NO: 81677 - protein, 88 aa, Zea mays
  Coding DNA Sequence Number=SeqID_39898
MESHDLRAEWESRLVGYIGLITWVMLKLGFLLVVSIATTAQAKMKLWKETSRSSKTTTSSRCGLAATPSWLPVKAAVIYVSFPHFDLL

SEQ ID NO: 81678 - protein, 154 aa, Zea mays
  Coding DNA Sequence Number=SeqID_39899
MGYTTCGYRVQPLQSVKLMHPALFLKSGCDTSLTLVVFIMVNIVRVRDSNLCRLLTKLKGGTYKDAEPRHVGPGAKRKEVTNTSHARVISERHNVCSAYSIDILRCFLGNARVMMSIVHAAARAYCLPTEWTGTPPAGWPSRRLPAEWTWHIKC

SEQ ID NO: 81679 - protein, 808 aa, Zea mays
  Coding DNA Sequence Number=SeqID_39900
  Homolog annotation: Hit_ID=Q75GP2; Match level="QueryCoverage=78%, HitCoverage=95%, E-value=0.0, Identity=79%"; Hit description =Expressed protein
MRDGLVAACQRSGHGTLNAEAAHRLPVEWTVLIKYRGGTSPASGIDRRRALSAINAEAARPRDLTSGSARWLTSRAVGHVVASGLRLSGERKRTQLGYSLSQNPGTLLGVARTPRRGVRLAPVEVLDLTWRSGPHIQGSDTFPWGSGPTVDALEYIVFSGHVATPEPSTWWGRVLFTTRLEPGCSSEFSGIEFGEAQLVQIKIISGGLWSSRGASYIMDLQNLGRSAEKILEVNGDKFNILASKFWSTWVGPGARRSKLMFRTWKGDKEFEPQSENTADTTVTTTIPGLPDLKAAGEGSVHHPLSAKESFKAAVTFLFRKWYLRAVSFWKNIKQLSENTLQLMVRSNWNDFLHIIKDLQLPSMDHLISTIVQWFERRSKAFEPTYLYGVEKGYFLLSEGAKTRHGVRTINITISARNPCFGNRWQQLLINSIVGYDTILTNSLVNSPGHGYLYNFQTKELYDLSYGHEPPEGPTRFGDYFVTKCGVLLMSLFVFFTTTMSVSFTLRETQSRMLRFTVQLQHHARHHLPTFQLIFVHVIESLVFVPIMIGILFFLFEFYDDQLLAFLVLTLVWLCELFTMISVRTSISMQFFPRFFLLYFLVFHIYFFSYTYGFSYLAFSATAAFMQHLILYFWNRFEVPALQRFMRSRAHIHQQTGVHITSSTIYTSTLHIARVNVRDPGTINDGLGAAREADALLVQDESTRSQQEGQQNGISEPAANNALQYQEQNPQRAGSTPAGSGSLNPFGSLLLWLLGGGASDGIVSFFSMFRDVRDHGQDYTDPPRNGNDQLVGKGEGCIYIHYMCTFPTV

SEQ ID NO: 81680 - protein, 225 aa, Zea mays
  Coding DNA Sequence Number=SeqID_39901
  Subcellular localization annotation: CTP_CleavageSite=33; ConfidenceScore=5.51e-01
MARAYKALPGFDCTLPRTLKPHRSLARCRLPVRSVSAAAQSLCRRRPANRAIPNPVQPSEKTVHTSVKLPERGIGVCFAGEASPRSPELSTPPDYVGRDTRAIQIPYVYPQQKPKPKDCNLADGEYILVPEQGAAQEVAPDPAPEPAPEDLPATALEGKPRRLCPSRDLRRGLPFRLWWVQVRSLHDGSQGSLEEMVAGVTWPSILPPGWTVEWDPASAEEEHEE

SEQ ID NO: 81681 - protein, 201 aa, Zea mays
  Coding DNA Sequence Number=SeqID_39902
  Subcellular localization annotation: CTP_CleavageSite=35; ConfidenceScore=5.54e-01
MARARAYKALPGFGCTLPRTLKPHRSLARRRLPVRSVSAATQSLYHRRPANRAIPNSIQPSEKTVHTSVKLPERGIGVCFAGEASPRSPELSTPPEYADRVIHSTILRFLVHTVTTLPREAHRALGLNQFAVVWPDTRAIQIPYVYPQQKPKPKDCNLADGEYILVPEQGAAQEVAPDPAPEPAPEDLPATALEGKPRFYA

SEQ ID NO: 81682 - protein, 305 aa, Zea mays
  Coding DNA Sequence Number=SeqID_39903
  Homolog annotation: Hit_ID=Q9LGH0; Match level="QueryCoverage=69%, HitCoverage=61%, E-value=4e-12, Identity=25%"; Hit description=NAM -like protein-like
MLHDDYMLIYVMFDLPVFNRMGSDWNQVMSQYGSFLSQIDEQPIGTQYSEFPVDGQPEGSRTPAVTKKPTQRTKLANFTAEEDTRCSTFAGYMMAVLRQNPSGLSDADKTSLAASRFAAIEKKPFHFLHCWAILKDQPKWMDNHMGQQQQQANANPTHSNTVDLDAEESVPSSFTSKRPLGRDASKEKAKRTKSVDTSSSDSEFMTRMGDLSLERLSVYKTAVSTEEKKLDSMNRNERQKLLLEKKKLNLEKIRLERQKLKEDKEEEIMILSMDLSKCNPLLRQYYEAKQQEILARVTGSTSSGQ

SEQ ID NO: 81683 - protein, 285 aa, Zea mays
  Coding DNA Sequence Number=SeqID_39904
  Homolog annotation: Hit_ID=Q7XEN8; Match level="QueryCoverage=72%, HitCoverage=53%, E-value=9e-13, Identity=26%"; Hit description =Transposon protein, putative, Pong sub-class, expressed
MGSDWNQVMSQYGSFLSQIDEQPIGTQYSEFPVDGQPEGSRTPAVTKKPTQRTKLANFTAEEDTRCSTFVGYMMAVLRQNPSGLSDADKTSLAASRFAAIEKKPFHFLHCWAILKDQPKWMDNHMGQQQQQANANPTHSNTVDLDAEESVPSSFTSKRPLGRDASKEKAKRTKSVDTSSSDSEFMTRMGDLSLERLSVYKTAVSTEEKKLDSMNRNERQKLLIEKKKLNLEKIRLERQKLKEDKEEEIMILSMDLSKCNPLLRQYYEAKQQEILARVTGSTSSGQ

SEQ ID NO: 81684 - protein, 112 aa, Zea mays
  Coding DNA Sequence Number=SeqID_39905
MQQMANDEKVDDFGCLEGMVPLAEDARVGIGEQSAPPTGAGEDPVAAAAPPGEDTSVAAAPAAEDPATLAGPSQVPTSGPAQATPTDDTNFVAVATAVSANDSLSGSESGYD

SEQ ID NO: 81685 - protein, 200 aa, Zea mays
  Coding DNA Sequence Number=SeqID_39906
MQQMANDEKVDDFGCLEGMVPLAEDARVGIGEQSAPPTGAGEDPVAAAAPPGEDTSVAAAPAAEDPATLAGPSQVPTSGPAQATPTDDTNFVAVATAVSANDSLSGSESGYDGEFGSPFSWSEESSDEDLDYFAALDVATAESSPRLEVGEAYDPPAGVRIERRQRKVVSKHSVGKMSRSGRHRRMGMERTRLRVDRGGQ

SEQ ID NO: 81686 - protein, 82 aa, Zea mays
  Coding DNA Sequence Number=SeqID_39907
MRVEWDALSCLIRGTRGVVGFAVGLSIGSGHSTCSDELGGVVGFAGGPSMGPGHSACSPKDDLRYNGSIDGFGYGDDNDVPR

SEQ ID NO: 81687 - protein, 203 aa, Zea mays
  Coding DNA Sequence Number=SeqID_39908
  Subcellular localization annotation: CTP_CleavageSite=16; ConfidenceScore=5.10e-01
MAKPTTPLVPLINQLSASHSTLMVALLSRVVTPQTGPYRERDLRQHTQEPRAARCLSKACIHSIHLEGSGASAAEGGGRTDRAVLAPEDLGAYRRARASGHASAKLYPRSEPLDLNQTEGIRGRPRRRAHVREAVPTVLARAIRIGRRGSDRGKQKAAAAPLLSAAVRSSELRLARARVAPGSPELGREGEGTTANSMAGKRP

SEQ ID NO: 81688 - protein, 98 aa, Zea mays
  Coding DNA Sequence Number=SeqID_39909
  Subcellular localization annotation: CTP_CleavageSite=53; ConfidenceScore=5.18e-01
MAHRSHSGPSKTFSPPFSLLCPWIHGLFPAIEFAVVPSPSLPNSGDPGATLARASLNSDDLTAAERSGAAAAFCFPRSNGSDRGYSFADACPDALARL

SEQ ID NO: 81689 - protein, 187 aa, Zea mays
  Coding DNA Sequence Number=SeqID_39910
MDREGRTAVRRSRAGRSNSGEPFRPRGGDLRHAKAWASFSRGRGDTGTYSGELDLAKSAGHCASTADRRGRAPVMVKLVEHRAQKGKLGTGMGVSPRGGARRGLAWSPTSWMAGNAGAGLRRRLAAWASTREGEAARNEVRGVHGALAGLYEGSWAHGRASWPRNPATCASAHALVHGERGGRGTNR

SEQ ID NO: 81690 - protein, 225 aa, Zea mays
  Coding DNA Sequence Number=SeqID_39911
MVLLPHHVARVTEPGSRRRARHCDGEQPKPYPAQAKPNLTRFLIMLQRGEWNVPPQRAVRTGLAHTVRRSSTRWVRRGSLTPRFQGAPPPHQRLLPRPNSPSVTRFEDDGCLRQTLRTFDFSFLEAWWGSEEKGIARVDEVERIRDPFYTVRGGNHHPEIPGSTSMAADAGFSCSPSGSTRDAVVRSNGDDTDAGAHLASEARKDEVRAAEVCWGRRSYAVGPTR

SEQ ID NO: 81691 - protein, 225 aa, Zea mays
  Coding DNA Sequence Number=SeqID_39912
MVLLPHHVARVTEPGSRRRARHCDGEQPKPYPAQAKPNLTRFLIMLQRGEWNVPPQRAVRTGLAHTVRRSSTRWVRRGSLTPRFQGAPPPHQRLLPRPNSPSVTRFEDDGCLRQTLRTFDFSFLEAWWGSEEKGIARVDEVERIRDPFYTVRGGNHHPEIPGSTSMAADAGFSCSPSGSTRDAVVRSNGDDTDAGAHLGQRGAQGRSACSGSLLGKKKLRSGTHK

SEQ ID NO: 81692 - protein, 71 aa, Zea mays
  Coding DNA Sequence Number=SeqID_39913
MAGGIELAGAKERGLAGEGERGVKWGRALGRLYLHGADVFNAREFGTTLIFGSSSFEFRKTENAVDLWKEV

SEQ ID NO: 81693 - protein, 160 aa, Zea mays
  Coding DNA Sequence Number=SeqID_39914
MGARNLTMAYRRAWSTRGGGRPKSGEGDLGLPVKFCRVRGLGKLHGPMAKLTEALARLGRDWRELATAAEALKAWRAVARRARGNFRTSRGFRLETGSCSVTKVPVSECLVPRSNCTKTVSNEFGLSSNFSRACSREFGTTLIFGSPGFEFRKTENAVDP

SEQ ID NO: 81694 - protein, 177 aa, Zea mays
  Coding DNA Sequence Number=SeqID_39915
TTDQAKDGGKKSFEVSSAREKVKETRNPKPGVKKKTCKVKVDRVKKTYESNIDLKQAKLGKTMKKVNGDESDDEEEYEDDSEDESSSPQGTFSCIASTNNNDRENETGDVEEEEIRRFYTNLNKEDKVLLVKLLSRNKEQGETLLRLEETLIKTNDSLEKMTKEHEELKCSHDNLVQ

SEQ ID NO: 81695 - protein, 178 aa, Zea mays
  Coding DNA Sequence Number=SeqID_39916
MVSHSGYGGYKCGHCTTAVGVSEALYAKAVLNAKLTRFNTKTTDQAKDGGKKSFEVSSAREKVKETRNPKPGVKKKTCKVKVDRVKKTYETTDQAKDGGKKSFEVSSAREKVKETRNPKPGVKKKTCKVKVDRVKKTYESNIDLKQAKLGKTMKKVKESTILSSAGGETEKLGEEQER

SEQ ID NO: 81696 - protein, 270 aa, Zea mays
  Coding DNA Sequence Number=SeqID_39917
MGDIRCLSASFLEECNSVGVGTFQPSFGFKDFHQPARLYPPRRRSPKTVTTSPWVGRSKSGCDLGRTLSFKDVHHPRWGGGRAEPELYLPRGFVGQPLLRHSRERALTGPAGGSDFDNAGLVLNAKLTGFNTKTTDQAKDGGKKSFEVSSAQEKVKETRNPKPGVKKKTCKVKVDRVKKTYETTDQAKDGGKKSFEVSSAREKVKETRNPKPGVKKKTCKVKVDRVKKTYESNIDLKQAKLGKTMKKVKESTILSSAGGETEKLGEEQER

SEQ ID NO: 81697 - protein, 188 aa, Zea mays
  Coding DNA Sequence Number=SeqID_39918
  Homolog annotation: Hit_ID=Q6QP51; Match level="QueryCoverage=33%, HitCoverage=29%, E-value=4e-17, Identity=75%"; Hit description =Putative growth-regulating factor 1
MAGDREKGYFERIFLRGSKAAPCGVWQPPQSTRALSHLLIRGSKAGPSEGFDSRPRARRVRDDPGYVRYMAEARATLPRYPRTFLRPAGTICNGIPPEGGTEPSDSIKWVRENHTIHPVPTTVPTTRVKLTTIRHILEYYDASKSSENVDRSTDQLTNNELSSPPKKMKHTQVSKAMPDSTCSKNDDS

SEQ ID NO: 81698 - protein, 149 aa, Zea mays
  Coding DNA Sequence Number=SeqID_39919
  Subcellular localization annotation: CTP_CleavageSite=60; ConfidenceScore=5.08e-01
MAKARLTSWCSAPWSLLRTWPPKAHRNEENNIVHPVPTTVPTTRVRLTTVSHGLSRVQPRAQQGAPPRPTPGLGLSLGLGRRSPPRPTLGLGLSLGLGRRPPPRPTSASASGGVTTSPDLGLGLRRSHRLARPRPQTDYATGDTSLPYL

SEQ ID NO: 81699 - protein, 119 aa, Zea mays
  Coding DNA Sequence Number=SeqID_39920
MDGMAHRSFSDPPEAFSPSFSPLCPWIHGLFPAIEFVVAPSSSLPNSDDLGATLACAGLNSGDLTAAERSSAACSRLFPPDNEQSEVPECVVGDLPEQPPGGAVGNMDDFEEFQEYDEF

SEQ ID NO: 81700 - protein, 155 aa, Zea mays
  Coding DNA Sequence Number=SeqID_39921
MVRKPRVGRRNSGEPFRPWGGDLRRAKALANFSRGRGDTGTYSGELDRAKSVGHRASTADRRGRASAKGLLVSPSIVALWRRGHKASSSLCLVGVRAGLRRGVARVVLEEVEDGCRLAADDDHHNRWWEHFRLLLNGSDEFVERALEAGGTPSEA

SEQ ID NO: 81701 - protein, 95 aa, Zea mays
  Coding DNA Sequence Number=SeqID_39922
  Homolog annotation: Hit_ID=Q337C1; Match level="QueryCoverage=91%, HitCoverage=23%, E-value=3e-37, Identity=88%"; Hit description=SH3 domain-containing protein 3, putative, expressed
MLNKETTFELGNNLCEDGKKYDTENTCSSGSTLLKAVLSFAKARSMMEKERGNLLKALGTQVAEPLRAMVMGAPLEDAHHLAQRYDRMRQEAEAQ

SEQ ID NO: 81702 - protein, 47 aa, Zea mays
  Coding DNA Sequence Number=SeqID_39923
  Homolog annotation: Hit_ID=Q337C1; Match level="QueryCoverage=81%, HitCoverage=10%, E-value=5e-10, Identity=76%"; Hit description=SH3 domain-containing protein 3, putative, expressed
MLNKETTFEVGNNLFEDGKKYGTKNTCSSGSTLSKAVLSFAKARSMM

SEQ ID NO: 81703 - protein, 43 aa, Zea mays
  Coding DNA Sequence Number=SeqID_39924
  Homolog annotation: Hit_ID=Q337C1; Match level="QueryCoverage=79%, HitCoverage=9%, E-value=3e-08, Identity=77%"; Hit description=SH3 domain-containing protein 3, putative, expressed
MLNKETTFEVGNNLFEDGKKYGTKNTCSSGSTLSKAVLSFAKA

SEQ ID NO: 81704 - protein, 358 aa, Zea mays
  Coding DNA Sequence Number=SeqID_39925
  Homolog annotation: Hit_ID=Q9LWV8; Match level="QueryCoverage=99%, HitCoverage=50%, E-value=1e-122, Identity=58%"; Hit description =Putative SEU1 protein
  Subcellular localization annotation: CTP_CleavageSite=100; ConfidenceScore=5.59e-01
MSGGACSNLGYARDMNGNVPISTTNSSGPSIGVSSLVTDANSSLSGGAQLQPSTSMNGDSLMRVPASPMSFSSNNISGSSVIDGSIMQQSPPQEQMQKRRSSSVTSQHVIDAGGALHAQKKSRTDVSQGDIMQHQLIQHLIHGQNSLHFQGQQNPQLQAFIQQHKLAQLQQRQQQHLLQPFSQMQQPQVGIPRQPQLRPPLAQTGMQLGGPVRTPIERGVCSRRILQYLFHKRHRPEDTWRCGICNTHAGKGYEATYEILPRLCQIRFDHGVIDEYLYFDSPNEFGLPNGQMVLEHAKVVQKSVYEHLHVIHEGHLRIIFTPELKIISWEFCSRRHEEYTTRKTIAPQVHGLNIRSKY

SEQ ID NO: 81705 - protein, 504 aa, Zea mays
  Coding DNA Sequence Number=SeqID_39926
  Homolog annotation: Hit_ID=Q9LWV8; Match level="QueryCoverage=86%, HitCoverage=59%, E-value=1e-165, Identity=63%"; Hit description =Putative SEU1 protein
  Subcellular localization annotation: CTP_CleavageSite=100; ConfidenceScore=5.59e-01
MSGGACSNLGYARDMNGNVPISTTNSSGPSIGVSSLVTDANSSLSGGAQLQPSTSMNGDSLMRVPASPMSFSSNNISGSSVIDGSIMQQSPPQEQMQKRRSSSVTSQHVIDAGGALHAQKKSRTDVSQGDIMQHQLIQHLIHGQNSLHFQGQQNPQLQAFIQQHKLAQLQQRQQQHLLQPFSQMQQPQVGIPRQPQLRPPLAQTGMQLGGPVRTPIERGVCSRRILQYLFHKRHRPEDTWRCGICNTHAGKGYEATYEILPRLCQIRFDHGVIDEYLYFDSPNEFGLPNGQMVLEHAKVVQKSVYEHLHVIHEGHLRIIFTPELKIISWEFCSRRHEEYTTRKTIAPQVNNLLQVVQKYQAVVTESGSAGISNNDAQTICNMFVTASQQLAKNLEHHTLNEHGLSKRYVRSLQISEVVNHMKDLIEFSHKNGLGPKGSNVYCDILALIDGDILVQGLIELIEYSYQQGASSFSEAYLERTSNLNVIGLKQFRMDDDEKFSRLDE

SEQ ID NO: 81706 - protein, 570 aa, Zea mays
  Coding DNA Sequence Number=SeqID_39927
MGRCELLGATCRSWDIRGSNDRLNRVFELNRLPYGGYPGEDVVDRRGKKPAAMTEDDLVPEATPSTKKRKLSTAVGELGVSDSFAMELMGTCAAPGGRMSSPELRESSARMLEVTGGRWPKNVPISRVAGEDFFTSRMARDLRVFPYGRNIAAVVSAVMNKDRQDAAQKHRAVVRMVDPVREAKRERGSAKAAASGSGKLVPAAKTAAPGGNKASTGEKAAAAGGTKPLPGGPTPAKLPPPGKRVADFGTNINVEDYLGGSGEGQLVVVPPSMAATSTSAVVKAKGATQDPWAAFCASGEILTAAAARDVAGTMSQRLRDVSQQLSQQPTQQLKQAADFADRVASGVLTADVAAEVENLRAQHADAVRDKSVAESKNRRLAEKVAALEAEKTDLRRRLAKERREANQVVAEAQATQAEAKVALAKGSLTSQLAEEWEARFNTLRSRVDKAETSVRSEVVRTHAQLVEAYLDLGARTADFEVPDREASLRFLEWLQEELLVLPTIVQGFMSYASLVTCEGAMNALSREGCKHYEVFDQSDDNFGREIFKVEDPVVKDSAGALFDRMWGPHG

SEQ ID NO: 81707 - protein, 575 aa, Zea mays
  Coding DNA Sequence Number=SeqID_39928
MGRCELLGATCRSWDIRGSNDRLNRVFELNRLPYGGYPGEDVVDRRGKKPAAMTEDDLVPEATPSTKKRKLSTAVGELGVSDSFAMELMGTCAAPGGRMSSPELRESSARMLEVTGGRWPKNVPISRVAGEDFFTSRMARDLRVFPYGRNIAAVVSAVMNKDRQDAAQKHRAVVRMVDPVREAKRERGSAKAAASGSGKLVPAAKTAAPGGNKASTGEKAAAAGGTKPLPGGPTPAKLPPPGKRVADFGTNINVEDYLGGSGEGQLVVVPPSMAATSTSAVVKAKGATQDPWAAFCASGEILTAAAARDVAGTMSQRLRDVSQQLSQQPTQQLKQAADFADRVASGVLTADVAAEVENLRAQHADAVRDKSVAESKNRRLAEKVAALEAEKTDLRRRLAKERREANQVVAEAQATQAEAKVALAKGSLASQLAEEWEARFNTLRSRVDKAETSVRSEVVRTHAQLVEAYLDLSAADCRFRSARTGEASLRFLEWLQEELLVLPTIVQGFMSYASLVTCEGAMNALSREGCKHYEVFDQSDDNFGREIFKVEDPVGEGFRGGTLRSDVGPSWLRGG

SEQ ID NO: 81708 - protein, 347 aa, Zea mays
  Coding DNA Sequence Number=SeqID_39929
  Gene Ontology: Mol. function=transcription factor activity; Cellular component=nucleus; Biological process=regulation of transcription, DNA-dependent
  Homolog annotation: Hit_ID=Q2QM94; Match level="QueryCoverage=66%, HitCoverage=92%, E-value=4e-64, Identity=59%"; Hit description=CCAAT- box transcription factor complex WHAP5, putative, expressed
  Pfam annotation: Domain name=CBFB_NFYA; Domain location=241-297; Score=129.8; E_value=7.7e-36; Accession=PF02045.6; Description=CCAAT- binding transcription factor (CBF-BNF-YA) subunit B
  Pfam annotation: Domain name=IQ; Domain location=48-68; Score=28.5; E_ value=2.3e-05; Accession=PF00612.17; Description=IQ calmodulin -binding motif
  Pfam module annotation: Pfam domain module=CBFB_NFYA::IQ; Domain location=241-297::48-68
MGDLWTNIRADLAKMQATLQKVEQGLLQIKAAVQHEQHQLALFVRLRTSAAVGIQAAARGFLARRRVREMRQQMLEADLVTVEFGTRGRDLALSDGHQQWHRAAISKCEHGDHRAEDQSHQKKQTEPGDQQEAPVTSSDSQPTVGTPSTDYVAPYAPHDMSHAMGQYAYPNIDPYYGSLYAAAYGGHPLPLCKMLGYGFSLLFLSQTPLMWEPPALGFAGMHPTLVGMHPAGLPLPTDAIEEPVYVNAKQYNAILRRRQSRAKAESERKLVKGRKPYLHESRHQHALKRARGAGGRFLNSKSDDKEENSDSSQKEIQNGVAPQKGGQPSTPPSPNGASSAYQAPSRE

SEQ ID NO: 81709 - protein, 195 aa, Zea mays
  Coding DNA Sequence Number=SeqID_39930
  Homolog annotation: Hit_ID=Q2QM94; Match level="QueryCoverage=32%, HitCoverage=29%, E-value=9e-16, Identity=63%"; Hit description=CCAAT- box transcription factor complex WHAP5, putative, expressed
  Pfam annotation: Domain name=IQ; Domain location=48-68; Score=28.5; E_ value=2.3e-05; Accession=PF00612.17; Description=IQ calmodulin -binding motif
MGDLWTNIRADLAKMQATLQKVEQGLLQIKAAVQHEQHQLALFVRLRTSAAVGIQAAARGFLARRRVREMRQQMLEADLVTVEFGTRGRDLALSDGHQQWHRAAISKCEHGDHRAEDQSHQKKQTEPGDQQEAPVTSSDSQPTVGTPSTDYVAPYAPHDMSHAMGQYAYPNIDPYYGSLYAAAYGGHPLVMHSLR

SEQ ID NO: 81710 - protein, 83 aa, Zea mays
  Coding DNA Sequence Number=SeqID_39931
MASRAHVLGSLLHPLAGLLCTAAPSLCFLALLWFELELVSHRRPWPTPCSGDESRAPCATSPAGFRPLALRPAEASGALLPQE

SEQ ID NO: 81711 - protein, 269 aa, Zea mays
  Coding DNA Sequence Number=SeqID_39932
MAAHGEVPAPTSNRQGDETPTVELMADEALRDRSAAPECPADACTPATIGFAGGGSPRPHEHSAASRIWERLLSTLGEEGRRWLLLAVEQGDESRLEMWHRERGIHHLSRELAMGDGGSPARARTREVPCAMAGAEGLASSPGRSSSAKGKKGCPRPWKKKAPGAWKGCAGEGRCPWEGAASLEEWSSAAMEFLPLRTYKKQREGAAVQRRPARGWRREPSTWALDAMAVAAGRAGRNRGRAGRPWQERRQGEEEDCWLKEEERVAARG

SEQ ID NO: 81712 - protein, 461 aa, Zea mays
  Coding DNA Sequence Number=SeqID_39933
  Homolog annotation: Hit_ID=Q6QP51; Match level="QueryCoverage=41%, HitCoverage=75%, E-value=9e-09, Identity=33%"; Hit description =Putative growth-regulating factor 1
MQAACNRATGMHLFDFDASSMESQAHTSYNRRVGYYVRKTAPPLAPVPRLLDCGTGAEIRGNPAHGPIVPAKHAGHGSVSRGRRRNGRYGQKWTDSNGGSRRAEAAVKSSAGSRPLLEQQESPLPRREDDAPVFRSSNGSRMHNGCPANHSSRRINSVERGYSERDPSLRRKRAPSPPTDQRIKGWPLGRAGPWKGSTAASGHSGSTLTTDQGFIGWPPEGFDSRLRTRRARDDSRYVRYMAEARATLPRNSRPRQIHASPEGILKSIQCKDRLTPYPDARSSVDKAEQPSPASGAIGSSASPDPRARTQPRPRKTVSASPDPRARTQPRPRTTVSASPDLRARTQPRPRMTISASPDPRARTQPRPQRSLRLARPCARTNHVAWGYIITLPLASSGYREQDRRPIWLAPVKQVMMTPRVLHDDGGAQPPTEARRRQQGPDSPDSCASTGFKHSSDGHDIT

SEQ ID NO: 81713 - protein, 569 aa, Zea mays
  Coding DNA Sequence Number=SeqID_39934
EQGDPWASKVSSTEDTEQQNDSWSSKMISGGAEDTSGGWDTKVKDSSCNDGGEGLQNDPWANKIGSNEGKEQETDPWASKMSSTVCADDKKGSWNTTAKGIPSKEKADDPWNSKGGNDDSKKTDTWGAGSSGGDQELSWSKPNFSLGDQESTWNNPRFSDDDNANNRGGFGRGNRGRGRGRNFGDGGGSSWNGGNRNDESGGGRSGEPWNRRDFDGGGGRGRGRFGRGDRNQGNNFGSGDGGSWGSGRGNGGRGGYRNWNDNNERSFGEGGGWSQSQSSDWNANKGNGEGNQAFSKSKPSWEAQNTSGRDGQAGKGDANNSWSKNRSSPSSAWGAPSGGAGGRGSWGKSNEDGWNSAGGSAKEKPAWGGGSEASTKKEDKGGEGNGSQGGGGVSSWDKGADDAWNGNTGSDIGSGGCHHAAAIDPSHHVAAIDPNHHDVVVAPVTRTSDDDEIGAEVGEDCGEIVQATHSYLIAPEVGMAFGSEEKSYDMYNDYAGAVQTELFTFGFLRRRSAIIHRTVRCAIGATASVGVSTPGGPWTDDLVHVMSWPSEERLNPVEVQLSGLSGLSD

SEQ ID NO: 81714 - protein, 1602 aa, Zea mays
  Coding DNA Sequence Number=SeqID_39935
  Gene Ontology: Mol. function=transcriptional elongation regulator activity; Biological process=regulation of transcription, DNA -dependent
  Homolog annotation: Hit_ID=UPI0000196BB2; Match level="QueryCoverage =30%, HitCoverage=57%, E-value=4e-39, Identity=34%"; Hit description =structural constituent of ribosome / transcription factor/ transcriptional elongation
  Pfam annotation: Domain name=KOW; Domain location=485-518; Score =13.6; E_value=0.47; Accession=PF00467.19; Description=KOW motif
  Pfam annotation: Domain name=KOW; Domain location=581-614; Score =22.6; E_value=0.0015; Accession=PF00467.19; Description=KOW motif
  Pfam module annotation: Pfam domain module=KOW::KOW; Domain location =485-518::581-614
  Subcellular localization annotation: CTP_CleavageSite=35; ConfidenceScore=5.42e-01
MAVKGKGKQVAAESPGPGAGAGGASGSGGKRRMASSDAGAGPSSSSAAKRRRRAGVLQFVDDVAGVDDDYEEDELESEDDTDDVISYSFTVNVFEGFFTGGEHAQNLSHKRTERSHPLPFLVKEEELSGDELEEFIKNRYSNRVKYAADRSYSREDDDIFSMDCALKEPTIWRVKCMVGRERQMAFCFMQKFVDLRKIGTKVPIITAFALDHIRGFVFVEAEKACDVTEACKGFCSVYTSRITSVPAAEVPSLLSSRTKPFEISRGTWIRMKNGNYKGDLAQGGAVSLKGAAVPAPRLISSQELEFFRPHIEIKRDRQTGEVFEVLDGLMFKDGFLYKKVALSSLIYWGIQPTETELLKFSSSPSNRASADDLDWLSGMYGSKKRNLPEKRDMESSSSKIRSSKASDLKASTSTENYDENDEFNLHDLVLYGRKDFGVIVAVEKDGFRILKGGPEGSAVKVRKQDIKKGCVDKMFTAVDHQKKTISINDTVNVVEGPFQGKQGVVKHLYLGILFIYNESESENCGFFCAQSGSCEKIRKGLGSSTTESSDFTTPMFPEPAYEQNGHRDTERPYRSTREQLFSIGQMLRIRKGPLKGYLCRVVRIFRNDVTVKLDSLLKIVTGINLSGAPASKFGSQDTSFFGSEAGKTSWDNGLPSFGKIYRNPSFEIRNKCSHNPLFVVTFSSKLPESDSWQPFSSSTLSVQNAVVHAKPLRGGESEADPWSKKTSAKDDSDPWGKKTDGDSDRWGKKTDGDSDPWGKEAVSAADGDSNPWGKETVPSAAGDSDPWGKKVVSSADGDSDSWGKKATSSAVDTEKEGSGGTAWDKQAGVGGSDAAGSSWDRAVVNESEKSDNWGEACRVMDMGTGAEADTDPWGSKVKAVDMEGPNNWEKATVPPNNKLEDVSQGWGQPKGNSTEDQAIDNVSKDVDNNRACDSSLPVTEDGTWGKSKDNSCGGAGGAGGWDVSVGNWNKSSVVADAQDEGWGKGNWSSAESEETNNQSGNWNKTGASDQAGYNNWDKPKSFGGNGWNKGDDQNSSWNRPENFGGGRGFGRGQGRGRGQQSGYFNGRNDQGSWKKSWGSDNAERPSWRSDNQVDNEAGESGGYRGRGRGGRGQYGGRGKDNGWRNDDRSNSGFGRENNSGDGPKWGGGGNWNATNPPSSSVGTKSYGQNQPFTWNNSEDNKPSVGEQGDPWASKVSSTEDTEQQNDSWSSKMISGGAEDTSGGWDTKVKDSSCNDGGEGLQNDPWANKIGSNEGKEQETDPWASKMSSTVCADDKKGSWNTTAKGIPSKEKADDPWNSKGGNDDSKKTDTWGAGSSGGDQELSWSKPNFSLGDQESTWNNPRFSDDDNANNRGGFGRGNRGRGRGRNFGDGGGSSWNGGNRNDESGGGRSGEPWNRRDFDGGGGRGRGRFGRGDRNQGNNFGSGDGGSWGSGRGNGGRGGYRNWNDNNERSFGEGGGWSQSQSSDWNANKGNGEGNQAFSKSKPSWEAQNTSGRDGQAGKGDANNSWSKNRSSPSSAWGAPSGGAGGRGSWGKSNEDGWNSAGGSAKEKPAWGGGSEASTKKEDKGGEGNGSQGGGGVSSWDKGADDAWNGNTGSDIGSGGW

SEQ ID NO: 81715 - protein, 322 aa, Zea mays
  Coding DNA Sequence Number=SeqID_39936
  Gene Ontology: Mol. function=transcriptional elongation regulator activity; Cellular component=intracellular; Biological process =regulation of transcription, DNA-dependent
  Homolog annotation: Hit_ID=UPI0000196BB2; Match level="QueryCoverage =53%, HitCoverage=16%, E-value=2e-33, Identity=41%"; Hit description =structural constituent of ribosome / transcription factor/ transcriptional elongation
  Pfam annotation: Domain name=KOW; Domain location=263-296; Score =23.8; E_value=0.00061; Accession=PF00467.19; Description=KOW motif
  Subcellular localization annotation: CTP_CleavageSite=35; ConfidenceScore=5.42e-01
MAVKGKGKQVAAESPGPGAGAGGASGSGGKRRMASSDAGAGPSSSSAAKRRRRAGVLQFVDDVAGVDDDYEEDELESEDDTDDVISYSFTVNVFEGFFTGGEHAQNLSHKRTERSHPLPFLVKEEELSGDELEEFIKNRYSNRVKYAADRSYSREDDDIFSMDCALKEPTIWRVKCMVGRERQMAFCFMQKFVDLRKIGTKVPIITAFALDHIRGFVFVEAEKACDVTEACKGFCSVYTSRITSVPAAEVPSLLSSRTKPFEISRGTWIRMKNGNYKGDLAQVVSVDDGRKKVMIKIVPRVDLHAISKKFVMLVYFRVKMTY

SEQ ID NO: 81716 - protein, 456 aa, Zea mays
  Coding DNA Sequence Number=SeqID_39937
  Homolog annotation: Hit_ID=Q5FB28; Match level="QueryCoverage=8%, HitCoverage=15%, E-value=1e-12, Identity=87%"; Hit description =Chloroplastic iron-superoxide dismutase precursor
  Pfam annotation: Domain name=Sod_Fe_N; Domain location=58-129; Score =15.5; E_value=9e-07; Accession=PF00081.12; Description=Ironmanganese superoxide dismutases, a
MASGGGATRLGLETGGNTRTARKHPHLLDLNWIVSRSPRSWRIGAWSWGEASMNPCEDALEPYMSKRIVELHWGKHHQDYVDGLNKQVATSPLVEYYSREIFVVKPTKSYDKITDRLQNKIGDEYKPFLLINPEDEKPVVVVIPKQTWFIHLFFSVRTLLKVEPWYQMTMKRKTRENMYKLGRIPVYHTFCGGFCNYFSLEWMHKYLMKKNEKQQATHYGQSQSEPAQEQGKKQDARMSKSNSSGVMAEAEAHQCVNTRADDFINKFGLHLQLQQLNSLLNYKEVLNRGGGKQQPQRSMNSKIMHLNSKNYFGDHHDARSIHDGGSRDTSFRRTDHGPSVSVISGSSLSSAKWRSPLSINKVAINNAANLQRMKTGDWRVEVSVPKQSMILLVDNDKKGSSKACSLKDTKRNAYESVDVDNKFDYDIVDDKRECSSVSEVASRSFETACHYCSGMH

SEQ ID NO: 81717 - protein, 358 aa, Zea mays
  Coding DNA Sequence Number=SeqID_39938
  Gene Ontology: Mol. function=binding
MKTGDWRVEVSVPKQSMIPLVNNDEKGSNDKQECSSVSEVASRSFETKHVTTAQECTEDCDSAEVTEQCPRGRESKSIGSTITDVTTHDTHSCCLNTMNELALVRKQLQEMERKQANFFDLLQEFMASSAENMSVLNLKVHNLENAADKTVYTITQSESRYHLPGSKHFKNQSVSSLPRLSTSTPRSSMDVNYKPPPISELKHEKWMRDLPSRGSNMCCKEGADFRKDHVRSKVRKLGPVSLEGNLGRCDPSSARSRTSGVKGTYPVSFTSSCEQSGLRNALCTSNQPGEFQDTDGMEPAYMEALNCGDYDDLIDLMDRTGPVLVKLSCETTNELLRVIAEQFLNKKFFDLALPWLQQ

SEQ ID NO: 81718 - protein, 688 aa, Zea mays
  Coding DNA Sequence Number=SeqID_39939
  Gene Ontology: Mol. function=transcriptional elongation regulator activity; Cellular component=cytoplasm; Biological process =regulation of transcription, DNA-dependent
  Homolog annotation: Hit_ID=Q5Z663; Match level="QueryCoverage=90%, HitCoverage=94%, E-value=0.0, Identity=63%"; Hit description=Ternary complex factor MIP1-like
  Pfam annotation: Domain name=DUF547; Domain location=438-583; Score =249.0; E_value=1e-71; Accession=PF04784.5; Description=Protein of unknown function, DUF547
MTCVRAEDAVSPAAADDVAAALVSRGGLIQKVAAGGGRRPAGSARSLQRSAHLATGDGNAPAPAVEASCSWSGDGIGKSNGGGKRDDRHRMRQYRSQLEQEVKKLQRQLEEEVDLHVALADAVTQNVAPILKSSMKLPHKAQELLINIASLEITVSNLEKKLNDLYYQLCHERNERLLAENNQGCLPSTSSDEHQSLSTCTCTWEEHISSLRDLKFGGSESMRSMRQDLFPELEDDQDMGEDPEGQQIVSLNRLLEKHRDSSLNRLLEKHRDEEQMQESGSMENEGNENEQPDTLSFEQSILKITSIKGGNLWSNPNELSEEMVRCMRNIFLRLSESLKISPKTSSDCSSSSVERLSGSTLASFSDSSIMPSMLRSPSVDSNHNDETMKEVRNFDPYKVNGKETRRDIGNYRSAAEVSWMSVGKDQLEYASEALKKFRFLVEQLSKVNPSCMDRDQRLAFWINLYNALIMHAYLAYGVPRNDIKLFSLMQKACYTVGGQSFSAAEIEFVILKMKTPVHRPQLSLMLTLNKFKITEDHKKYSIDEFEPLLLFGLSCGMFSSPAVRIFSAANVRQELQESLRDYIQATVGTNGKGKLLIPKLVQSYAKGAVEDSLLADWICHHLAPDQATVIRDSSSQWKQRLLGARSFTVLAFDSKFRYLFLPDSCGSQSQKPEAKQSYKLPEPCSESE

SEQ ID NO: 81719 - protein, 217 aa, Zea mays
  Coding DNA Sequence Number=SeqID_39940
MCRAVSLSRVNAALIGRMKVNRELTPDQEQLASAAGAGALPSPVARCAERCSERAEPADWQPVAGGTGHGAPPRSSLWPAARGSCRSFRAASSLTPGGGFVELELLPAWAWADSSNRSEVDEGRRAGEEESCRAVVPSARRRAADSSADPSLGAPPGVICQAVEDTAEDTTSAMPNSWETADIDAHMSRLILSACRVSSPLDLAFSMKKTVTSVTRG

SEQ ID NO: 81720 - protein, 155 aa, Zea mays
  Coding DNA Sequence Number=SeqID_39941
MVQWFTRSTCSGGVTNSRERERTVPAGLVLDSSLGRLHGPSRKLSEGSDRAEVGGSGLVTMVALGRLWRVAERSPELRAGSGRLGVVRRGRQGRWPCMRVGFIATREHDTGVGTGAAEGAQGRACGRALGVPECLPTSNTWWFTSAGVQRPVWSP

SEQ ID NO: 81721 - protein, 147 aa, Zea mays
  Coding DNA Sequence Number=SeqID_39942
MGVGTGAAEGARGCACGRALGMFPSACPRRTRGGLLLPVFNGLFSHLSVQISAKIPYTVFSLHHILSFPFRGDISMMTTGRRAIKVLNPNMSGGTILLMAALRVPSTQFRNLRPSLPLLVKGVVQLGVEHGDQVDHAAQSGIALTNW

SEQ ID NO: 81722 - protein, 38 aa, Zea mays
  Coding DNA Sequence Number=SeqID_39943
MDVADLRTARPSLMRWTDSHTPTRQQVAVRLLRKAGLF

SEQ ID NO: 81723 - protein, 317 aa, Zea mays
  Coding DNA Sequence Number=SeqID_39944
MTFVAFDYIDSIILKTTRETSNDKADRADSYASGIRIPYSSPFAKGSSRSDKNELPTHQKGCKITNSKRLTGDHCTSSDNDLCLGRLNNSSDCPRANATVKRPSPPSPYGGREQAIKAKEPEVRPQVAPTVLSAEATTSAVGSLTCGGHHLSTDNSGHLRTNTAPANGGHPSAHKEVLAPVLATGVRTRTSRNADTRPCGVRHLVRPPMWPVAREGPWTWPTCARRDRRPCGGRTATPRPGSRWQFASSARLVNALLPRMLEGEAGRQPRRKAGPQLGLPSSPAWMMNILEAKGRGRPQPGSLFSTTRLMVIILGDH

SEQ ID NO: 81724 - protein, 170 aa, Zea mays
  Coding DNA Sequence Number=SeqID_39945
MLSMFQNIQDRQDSLQQQLLQDRAESRAFMALMLQHSGVSVPPVQSAPPPPLQAPVVPAIQTGPPLPSVGPSSSPLRLVTLAFTSPVLSSVYPQPPVPPASAVTTPAVAVSVTTSVPAASAARPQSESVPAPASTTDPGSETDSDPPPAFALLPRPRPDAPPPPPPASDV

SEQ ID NO: 81725 - protein, 391 aa, Zea mays
  Coding DNA Sequence Number=SeqID_39946
MRFCFEREDVTITASQIRQLFGFHESSTRLHSLCYGTSDPPRRPHDGVAPGTAHVAALFRSPFSVGSRRSPADYTTAAKFLFQLMRRTLLPRMGYREATTHIQLWLLGALVSHSEFDVVDFLICEIEDTVLDGMRARRQLPYAHYLCHIFAQLIWPPQFQGTLEASRLVFGPYRPAPEDPVPASAPVFDTQAEDAALHQFEAQDAAVDDDDDFGIPPSPPPPMPPCSHDHEAGSSRATLLPLLLLTLRLLRFYRLSLNSRLTWQPSRPARQQPISSYPRGCSRCFRPYRTDMILFSSSFSRIGLRAGHSWLLCYSILPPVPPASAVTTTVVAVSVTTSVPTASAAWPQFDSVPAPASTADPGSETDSDPQPAFALLPRLDAPPPPPPALDV

SEQ ID NO: 81726 - protein, 53 aa, Zea mays
  Coding DNA Sequence Number=SeqID_39947
MEAERMRLRKPKQKASTNGRVKNHRWPLFRGSGKGIFRKRILLSEGNGPEPSY

SEQ ID NO: 81727 - protein, 156 aa, Zea mays
  Coding DNA Sequence Number=SeqID_39948
  Homolog annotation: Hit_ID=Q6QP51; Match level="QueryCoverage=59%, HitCoverage=32%, E-value=7e-28, Identity=74%"; Hit description =Putative growth-regulating factor 1
MRLRKPKQKASTNDRVKNHRWPLFWVYKGPGKSKRHLWQAKRATFHLRHDDRIKKGTRKGDISKRILLHEGNGPPSPPTDQGFEGCALRGPAAAPEHSGSAPITDQGFEGWPLGRAQQPPQSTQAPRPLLIRGSKAGPSEGFDSRPRACRVRDDPG

SEQ ID NO: 81728 - protein, 405 aa, Zea mays
  Coding DNA Sequence Number=SeqID_39949
  Homolog annotation: Hit_ID=Q6QP51; Match level="QueryCoverage=20%, HitCoverage=41%, E-value=6e-36, Identity=76%"; Hit description =Putative growth-regulating factor 1
  Subcellular localization annotation: CTP_CleavageSite=56; ConfidenceScore=5.00e-01
MAEGRLSPLASSGVTDKVFTDVLQGPPPTTRGLGPIRHASWPGTEEAEPPRVERITASRLQALLHPRRNQRSKGRTDMQVACHRTTGAHPFDFVASSMEAQAHTSCNRHTGYYVQETAPPLAPMPHLLDCRTSAATRGNPAHGPTVPIEHIDHGGALSHGAKTTRPCSVPQTARTTTASRTTRPVALTPRQGKRHLWQAKRTTFHLRHDDRVKKAAPEHSGFRLITDQGFEGWPLGRVRQPPQSTRAPRPLLIRGSKAGPSEGFDSRPRACRARDDSGYVRYMAEARATLPRRIQCEDRLTPYPDTRASVGKVEPQAQQEAPPRPTLRLGLRRRSPPRPTPGLSLNLSLESGLRLARPQGSASTSTSGGIASSPDPALGLRRSLRLARPWTRTDRATEDTSLPYP

SEQ ID NO: 81729 - protein, 134 aa, Zea mays
  Coding DNA Sequence Number=SeqID_39950
MGEGMQPGCMMKILEAERWLKGANPRVVALLQQQQDEGNAGAPHPGARKAALPTRILRRHGQSLHRRAPGSSPYNTRAGSRTSCDADINTNTSTSTPAAPSPAQAPPLPPGPVTRARARELNYIMLLKNEGPEE

SEQ ID NO: 81730 - protein, 111 aa, Zea mays
  Coding DNA Sequence Number=SeqID_39951
  Homolog annotation: Hit_ID=Q9FMW9; Match level="QueryCoverage=39%, HitCoverage=22%, E-value=3e-11, Identity=63%"; Hit description =Farnesyl cysteine carboxyl methyltransferase-like protein
  Pfam annotation: Domain name=ICMT; Domain location=6-91; Score=-20.5; E_value=0.03; Accession=PF04140.4; Description=Isoprenylcysteine carboxyl methyltransferase (ICMT) family
MVDDNMIAGRAFMHVIRTYYEDQHQLITHGLYRFMRHPEYSSFLIWTVGTQGTQNFFHARTRVRTSKIQCSSATRVICSEVTKQDNDQQPPSTKDNSHCVQNYGFQMVLNV

SEQ ID NO: 81731 - protein, 159 aa, Zea mays
  Coding DNA Sequence Number=SeqID_39952
  Homolog annotation: Hit_ID=Q9FMW9; Match level="QueryCoverage=28%, HitCoverage=23%, E-value=2e-11, Identity=60%"; Hit description =Farnesyl cysteine carboxyl methyltransferase-like protein
  Pfam annotation: Domain name=ICMT; Domain location=38-139; Score= -13.1; E_value=0.0067; Accession=PF04140.4; Description =Isoprenylcysteine carboxyl methyltransferase (ICMT) family
MKLSGQSPKRMRYLSSLWVSLPSHLILSVSTCLASANALNSVSAQISKPEDWELIAGRAFMHVIRTYYEDQHQLITHGLYRFMRHPEYSSFLIWTVGTQGTQNFFHARTRVRTSKIQCSSATRVICSEVTKQDNDQQPPSTKDNSHCVQNYGFQMVLNV

SEQ ID NO: 81732 - protein, 128 aa, Zea mays
  Coding DNA Sequence Number=SeqID_39953
  Pfam annotation: Domain name=potato_inhibit; Domain location=66-128; Score=48.3; E_value=2.6e-11; Accession=PF00280.8; Description=Potato inhibitor I family
MKDCHTRARAAAAAGRAGPWPWLVARERVGEQASEITDRRDTLARIRLMGRTTPAAVAAADDDGQKTSWPEVVGWVTLNAALQISSDRPDVSTDFYSETTTLPTDYDANRVIIVADDRNVVVRTPVIG

SEQ ID NO: 81733 - protein, 111 aa, Zea mays
  Coding DNA Sequence Number=SeqID_39954
  Subcellular localization annotation: CTP_CleavageSite=36; ConfidenceScore=5.23e-01
MVKKSRTPVADPQGMPAVRSRCRKMYAVQSLERSPVAGKKSSRTRQLGKTSNEAAGQTDHASSREDAPQKSDRPHTRASVSLRSVISEACSPTLCARRRWDENVLFAIRVR

SEQ ID NO: 81734 - protein, 137 aa, Zea mays
  Coding DNA Sequence Number=SeqID_39955
MGISNHTTYVALNPCICQPFPRILHYMNWSAQPGGTLPYHPASCQEDNCYSHHLPCPVRGCQFTYGIAGFRLTHDEVCGQLKGPRSIGLQSVSRKGNQFSRKEMHQRFSTQLLSPNASNKVIKILKHKEVANALGLA

SEQ ID NO: 81735 - protein, 130 aa, Zea mays
  Coding DNA Sequence Number=SeqID_39956
  Subcellular localization annotation: CTP_CleavageSite=68; ConfidenceScore=5.58e-01
ALVPSRAWSCAIFTPPWRPCPLGLVWASCTTVPSCAAVSSTSTRRPRCDFARMSLMHPLLKLQQHQRQAAAISELREEVYIKEKFATLATYLVMGKPEPGYSICEMTTAHWAWEMVGVAVILLARGWMVG

SEQ ID NO: 81736 - protein, 80 aa, Zea mays
  Coding DNA Sequence Number=SeqID_39957
MEEKAGGMGAMAGKKLLRAAMRKTETWSSQGGAATGRGARLASSLEEGARRRGRLAAMGEQGHPRAPRSFCSCAHKAEKE

SEQ ID NO: 81737 - protein, 281 aa, Zea mays
  Coding DNA Sequence Number=SeqID_39958
MAASAGRHGRKSWGHGRHGWEEAPARSREEDRNMELAGRSGDRKGSSAGVQPGGRSSPQGKAGGHGRVGAPACSKELLLLRAQSREGASEKAKCDNLKSLSIRGFEFGSDMRYLAESISAFFSARTRAWDFNHLRAEILELDRVYHVVGIRPSPGFSTVPHARLMNRVSLPATFSREYRSPEPPPPSCSSPPPRASTYSSNWTPIGTPGDRAGHGETVRGRNRSAVTGVLLAVDCSRQAPLFVESGPSDSSPLIIIVNGNMERPPGKTVLPQGYNGTPLAD

SEQ ID NO: 81738 - protein, 202 aa, Zea mays
  Coding DNA Sequence Number=SeqID_39959
MASGRTLLQPCPRLRRRSRGEDKYKEPEARSADGGGDPVGNGDFSSCLHLGTDDRGRQPSGRSPLRSSRTSGAPTSAWRRRTGAKRAISWAVLPCARRGNRLPAGGGTGSQADEPDALRLTTPAVDQPRVVEVRPARRASERPLPRTSKERPTHEPAREVELRLSPASTPASMMNILEAEGGTKIAARLASPHPGAGGHRLG

SEQ ID NO: 81739 - protein, 227 aa, Zea mays
  Coding DNA Sequence Number=SeqID_39960
MALPRGGRCPTHPGGSEWGSAGGLTAPVAGAEVERGRGQGCSGVRSEAIAAAVRPPVAGAVVAAAGAGDESLSSVGLAVRGFSCLVKGTPRPLFDELRPGVAVSARTEAELARKEDLVGRSLAGSSISGTDAGVDLPRPRAGLISSGDSWPRPRGDQLSRLLEPDSWRRPRRRWPGRDDEVVLQSGDPRATSPSEARSDLAEGVVDAEGAAAPFSCQDPSLQDRIIL

SEQ ID NO: 81740 - protein, 77 aa, Zea mays
  Coding DNA Sequence Number=SeqID_39961
MTVSTTDIPVLHSAEVAHLYPQDVFPLSPGVDRTIKHYQGVSHLEHGSALPEDDAALSASPEVASAQSVSPEPVSGR

SEQ ID NO: 81741 - protein, 109 aa, Zea mays
  Coding DNA Sequence Number=SeqID_39962
MAVSTTDIPVLHSAEVAHLYPQVMLPICQRVMNPIHLYRGEAGIIKFSFYFCMVDLPPEQQVLLGCLLEEEQFVSVEFAARNCHKQVSSDSYQKGRSSKDTKVDTAPKL

SEQ ID NO: 81742 - protein, 345 aa, Zea mays
  Coding DNA Sequence Number=SeqID_39963
  Homolog annotation: Hit_ID=Q9FLU1; Match level="QueryCoverage=15%, HitCoverage=9%, E-value=2e-16, Identity=80%"; Hit description =Arabidopsis thaliana genomic DNA, chromosome 5, TAC clone:K18P6
MGDEEDDPDWLRAFQVSVGQSEAKIEAIMNDFIQLEPQSNLFEAETMVEGTLDGFTFDSDEEGDKLYEPQANQNDLNNNEDEGQPKAKTKRKAEKTTGKAPKKAKVAGKGPKKGTRKTQPAKRGQGSAHSRDTISPHPASGKDSRPRRIHVSPEGPLKQRAHLQLARGPARAGFAEKQPWPDRHASRPDRRSIQRKDRLTPYPDARSSVDRAEPPSPASGAIGSSASPDPRARTQPRPRTTDSASPDPRARTQPRLRKTISASPDPRARTQPRLRKTVSASPDPRARLNLDLGRRSPPRPTPGLGLSLDLGRRSPPRPTPGLGLSLDLGGRSLPRPTSGSDRPRH

SEQ ID NO: 81743 - protein, 298 aa, Zea mays
  Coding DNA Sequence Number=SeqID_39964
  Homolog annotation: Hit_ID=Q9FLU1; Match level="QueryCoverage=36%, HitCoverage=22%, E-value=4e-18, Identity=47%"; Hit description =Arabidopsis thaliana genomic DNA, chromosome 5, TAC clone:K18P6
MSKADPSHGHSPMGYNTAVYGYGKDLDSTEFPHNFNILSRKGNQTEGELGRTEIGIGPRIYPTVFALPRILHLANNLTEGLIFFSGLRREEYESYLPDSYCQEIPEENILSFWRTKRGKGRNVWGNYCSKHSAKEDGPFIPNPRHSMASKEIHQSENIFPPKGAFFNRAMRDPARSIALIECDGDSIDLSGDIGAVGRIVVSNGPTAKQDLLLDLKGTIYKTTIVPSRTFCVVSVGQSEAKIEAIMNDFIQLEPQSNLFEAETMVEGTLDGFTFDSDEEGDKLYEPQANQNDLNNKRR

SEQ ID NO: 81744 - protein, 282 aa, Zea mays
  Coding DNA Sequence Number=SeqID_39965
MDKKGKRPSEKTVHVSVKLPERGIGLCFTGEAGPRSPDFNRPPATVDRGTPCASLRFLARLDSLDLHEAPYALGLNYAAVDRPEHTPPTSSPACSRGPGDSGHPRRRAVPRRDRQTLPEPTLPFAGPPSPPFKKNRKSDTNIEPEGTPIFVEAIQIHYVILNENLSLKGNCNLADGEYILVLEQGAAQEVAPDPALEPAPEDLPATALEGKPRGLYPSRDLRRGLPFRLWWVQVRSLHDGQSGSVRHCSLEEMVAGITWPTTLPPGWTVEWDPASAEEEHEE

SEQ ID NO: 81745 - protein, 217 aa, Zea mays
  Coding DNA Sequence Number=SeqID_39966
RICPGVSQLSDSPRCQEESTPARTPAPRPSQASALVRVRDYKTPRSLGRTPPHALKPHRSSVRRRLPIRDVPAGHPSPCHRRPASPAIPNPVQPSEKTVHVSVKLPERGIGLCFTGEAGPRSPDFNRPPATVDRGTPCTSLRFLARLDSLDLHEAPYALGLNYAAVDRPEHTPPTSSPACSRGPGDSGHPRRRAVPRRDRQTLPEPTLPFAGPPSPP

SEQ ID NO: 81746 - protein, 177 aa, Zea mays
  Coding DNA Sequence Number=SeqID_39967
  Gene Ontology: Mol. function=small conjugating protein ligase activity; Biological process=protein modification process
  Homolog annotation: Hit_ID=O24560; Match level="QueryCoverage=34%, HitCoverage=47%, E-value=2e-12, Identity=52%"; Hit description =Ubiquitin carrier protein
MRRLAHLSVHDRLRRAFGIKISRSTPVGWVLLLGWSNDSNVFEWQVTIIGPPGHPILCFLTSCIIFEQTPVYPDGWVCISILHPPGEDPNGYELARYFHHFWYGSVFNVPGIIILFLVWIWNGLGSTTMMRQSCSKDWMISIPPLPIRLGSPSPLCPTGTKQPMELEEVHRPSRLDA

SEQ ID NO: 81747 - protein, 241 aa, Zea mays
  Coding DNA Sequence Number=SeqID_39968
MMRQSCSKDWMISIPPLPIRLGSPSPLRPTGTKQPMELEEVCTDAWTMYSFKNSPNNQSKSCISLIKIISKRSSAKGANLARIVVILVSGLEKRKLALVLVPSLRMGTLTLIRVRSIVVKARCTIWTIGINAVRAHNKLDDIREQGFFGRTIYTTLIPLVACHPDVCEPCDDFFGLVDALLSYKAQLLTLQPKLYCNLADREYVLIPEQGVAQEVVQEPAPEPATEDLPAPAVEGKPRFYA

SEQ ID NO: 81748 - protein, 134 aa, Zea mays
  Coding DNA Sequence Number=SeqID_39969
MGSSSLRAERESRLMGGNEIDGSGYGYGAGKWYSFRLERAPPAPPLGAPASGVAAGGDPDDGGGDDSSSHDTDFSADQEPEGWVARPITCDAARECHFHDALDTLLRRALNRRTWSIEYRCVVYQHSRGVYPDR

SEQ ID NO: 81749 - protein, 95 aa, Zea mays
  Coding DNA Sequence Number=SeqID_39970
MESHDLRAERESRLVGGNEIDGSGYDYGAGKWYSFRLERIVSIATTAQVKIKLWKETSRSSKTTTSSRRGLAATPNQLPVKAAFIYVSFPHFDYL

SEQ ID NO: 81750 - protein, 94 aa, Zea mays
  Coding DNA Sequence Number=SeqID_39971
MARQPAREAKAVEDFRGLTVAYKAGKFQCGKGPQLIYFHQVINITGKIRYITSFDQKEHRKSVIRAQLHVRATITKLGKGPQLIYFHQVIKYSI

SEQ ID NO: 81751 - protein, 79 aa, Zea mays
  Coding DNA Sequence Number=SeqID_39972
MARQPAREAKAVEDFRGLTVAYKAGKFQCGKGPQLIYFHQVINITGQIRWRGARTSREAASPDAAAGTVGPVKEGGEPE

SEQ ID NO: 81752 - protein, 190 aa, Zea mays
  Coding DNA Sequence Number=SeqID_39973
MARQPAREAKAVEDFRGLTVAYKAGKFQCGKGPQLIYFHQVINITGQIRWRGARTSREAASPDAAAGTRLVELELGNCESLHGSMGDRRDDDESDWIHGGLHREARFAGEDGVADGRGLQGAGLREGEWGTREDGGGAAMRDCRGGAPHRGEGEGGRLLRRGDRGEEGRRGEIAAGRGSRRPARAGSGAS

SEQ ID NO: 81753 - protein, 174 aa, Zea mays
  Coding DNA Sequence Number=SeqID_39974
MRDCAAALGGGRGRALAEERRPRRGGEARGDRGREGISPACAGRERGFVKESGAHARMEGAPRCEVAEGEHRDAGLRRRAGGEGEGEGEGGRLPRRGVRDEEGRRGEIVAGISSTCVGLRAGAAGAGRGRAGGGIGMVARAAGTRTESRADESGWRRGIARWQNQALWTPTLKT

SEQ ID NO: 81754 - protein, 241 aa, Zea mays
  Coding DNA Sequence Number=SeqID_39975
MWRLGDVRYPGESSGSRGGEKSERAVVPSLATSIHLGEGASRRGSSAEPGKLGSKRPCSSGSGGGPLSVVGGKEVAREETEIQGSGATVGVRRRRTAIAKKLRRSTTPTKEGAQKRKRISSPPSSSASTSSGAPHPKRKRVVEERCADIVDVVHGAFQPVSGPVLNEMNRALVQIEDLANDLDQLALEKDWEMEHMTPTPIAESSQTEDELLIDYDSELNNDEIVGYDDGRDYSTDDTYPY

SEQ ID NO: 81755 - protein, 135 aa, Zea mays
  Coding DNA Sequence Number=SeqID_39976
MWRLGDVRYPGESSGSRGGEKSERVVVPSLATSIHLGEGASRRGSSTEPGKLGSKRPCSSGSGGGPLSVVAGKEVAREETEIQGSGATVGVRRRRTAIAKKLRRSTAPTKEELNNDDIVGYDDGRDYSTDDTYPY

SEQ ID NO: 81756 - protein, 63 aa, Zea mays
  Coding DNA Sequence Number=SeqID_39977
MTQKRDHARRRDIYVMIHVMCKAGNLGVGSDIGEADEGRGGLQMNEEEWMKQESYSMKWKLKD

SEQ ID NO: 81757 - protein, 720 aa, Zea mays
  Coding DNA Sequence Number=SeqID_39978
  Gene Ontology: Mol. function=transferase activity; Cellular component= mitochondrion; Biological process=metabolic process
  Homolog annotation: Hit_ID=Q8S5U6; Match level="QueryCoverage=76%, HitCoverage=98%, E-value=1e-85, Identity=31%"; Hit description =Putative indole-3-acetate beta-glucosyltransferase
  Pfam annotation: Domain name=PPR; Domain location=169-202; Score=9.2; E_value=0.6; Accession=PF01535.11; Description=PPR repeat
  Pfam annotation: Domain name=PPR; Domain location=203-237; Score =40.7; E_value=4.9e-09; Accession=PF01535.11; Description=PPR repeat
  Pfam annotation: Domain name=PPR; Domain location=238-272; Score =41.6; E_value=2.7e-09; Accession=PF01535.11; Description=PPR repeat
  Pfam annotation: Domain name=PPR; Domain location=273-307; Score =55.1; E_value=2.4e-13; Accession=PF01535.11; Description=PPR repeat
  Pfam annotation: Domain name=PPR; Domain location=308-342; Score =52.8; E_value=1.2e-12; Accession=PF01535.11; Description=PPR repeat
  Pfam annotation: Domain name=PPR; Domain location=343-377; Score =40.8; E_value=4.7e-09; Accession=PF01535.11; Description=PPR repeat
  Pfam annotation: Domain name=PPR; Domain location=378-412; Score =40.2; E_value=6.9e-09; Accession=PF01535.11; Description=PPR repeat
  Pfam annotation: Domain name=PPR; Domain location=413-447; Score =60.1; E_value=7.1e-15; Accession=PF01535.11; Description=PPR repeat
  Pfam annotation: Domain name=PPR; Domain location=448-482; Score =38.0; E_value=3.2e-08; Accession=PF01535.11; Description=PPR repeat
  Pfam annotation: Domain name=PPR; Domain location=483-517; Score =38.5; E_value=2.2e-08; Accession=PF01535.11; Description=PPR repeat
  Pfam annotation: Domain name=PPR; Domain location=518-552; Score =53.6; E_value=6.4e-13; Accession=PF01535.11; Description=PPR repeat
  Pfam annotation: Domain name=PPR; Domain location=553-587; Score =13.7; E_value=0.18; Accession=PF01535.11; Description=PPR repeat
  Pfam annotation: Domain name=PPR; Domain location=603-637; Score =19.2; E_value=0.015; Accession=PF01535.11; Description=PPR repeat
  Pfam annotation: Domain name=PPR; Domain location=638-672; Score =43.4; E_value=7.7e-10; Accession=PF01535.11; Description=PPR repeat
  Pfam annotation: Domain name=PPR; Domain location=673-707; Score =10.0; E_value=0.48; Accession=PF01535.11; Description=PPR repeat
  Pfam module annotation: Pfam domain module=PPR::PPR::PPR::PPR::PPR::PP R::PPR::PPR::PPR::PPR::PPR::PPR::PPR::PPR::PPR; Domain location=169
  Pfam module annotation: Domain location=483-517::518-552::553 -587::603-637::638-672::673-707
MTELGEKERGQEAYQGQGAANGHQPRALPNLQRADDANNAIDVFGSEVQVSEAQPASASTRQATAEACSSHVHHAHLAALLNASARLPPLPLSRLHLPLSLPTASRLVASFPPLPLLVCFLRALRLLPSSPPRPFDSLIKSYASLPNRASLAAAALAFARSAGYVPSVLAYNAVLLALSDASLTSARRFFDSMLSDGVAPNVYTYNILIRALCGRGHRKEALSILRDMRGAGCGPNVVTYNTLVAAFFRAGEVDGAERLVGMMLDGGLKPNLVTFNSMVNGMCKAGKMEDARKVFDEMMREGLAPDGVSYNTLVGGYCKAGCSHEALSVFAEMTQKGIMPDVVTFTSLIHVMCKAGNLEWAVTLVRQMRERGLQMNEVTFTALIDGFCKKGFLDDALLAVRGMRQCRIKPSVVCYNALINGYCMVGRMDEARELLHEMEAKGLKPDVVTYSTIISAYCKNCDTHSAFELNQQMLEKGVLPDAITYSSLIRVLCEEKRLSDAHVLFKNMIKLGLQPDEFTYTSLIDGHCKEGNVERALSLHDKMVKAGVLPDVVTYSVLINGLSKSARAMEAQQLLFKLYHEEPIPANTKYDALMHCCRKAELKSVLALLKGFCMKGLMNEADKVYQSMLDRNWNLDGSVYSVLIHGHCRAGNVMKALSFHKQMLQRGFAPNSTSTISLIRGLFENGMVVEADQVIQQLLNCCSLADAEASKALIDLNLNE

SEQ ID NO: 81758 - protein, 343 aa, Zea mays
  Coding DNA Sequence Number=SeqID_39979
  Gene Ontology: Mol. function=cysteine-type peptidase activity; Biological process=proteolysis
  Homolog annotation: Hit_ID=Q2QTP9; Match level="QueryCoverage=72%, HitCoverage=39%, E-value=2e-13, Identity=21%"; Hit description =Expressed protein
MQKGLIDPQPNPKRLIIESSQECFSVDIPRSTDMADPTNTPSDGDPPQHRKTGVAAAAKNIVMPNVDDDDDFEPPKKKCNISMDAPNKTQILNERQRQTIVRKGFSSILDMTIDAIGCRTLLCWLMQKLDPRDMTLRIGPDKELKITKQTVHQILGLPNLGGGKPLNINEANAAATLRASLNISKDEFVISKLQDRLRLGQDDDLSIRCFFLILFNRLLFPTASWSISFNEVVLIEEMERFPQIDWCHLIFSDLCEAAQRWHNRSINNVSATIYGCSIIVLLYYLDHLHHAAAPNNKNGTPRIKYFNKNIIRALSMADKRKPRQGGEPFGVCPFRSLLVSLYL

SEQ ID NO: 81759 - protein, 150 aa, Zea mays
  Coding DNA Sequence Number=SeqID_39980
MARVACTLYGKRLDGGLSMLSVGVNPVWDVQDMPRTRKTARKSTGPIGVPRHQLASRHEGSSSGNNDPIGDLEAKVEQLQTELRHRNRVWAEDGQRINELAADVIRLLDELSEWDLAVDWAINSHSIAWDREAKARARVTKLSEALDLLQ

SEQ ID NO: 81760 - protein, 181 aa, Zea mays
  Coding DNA Sequence Number=SeqID_39981
MARVACTLYGKRLDGGLSMLSVGVNPVWDVQDMPRTRKTARKSTGPIGVPRHQLASRHEGSSSGNNDPIGDLEAKVEQLQTELRHRNRVWAEDGQRINELAADVIRLLDELSEWDLAVDWAINSHSIAWDREAKARARVTELSAALDNLQVYCNTLHEEVHVLYARLHLDVPSDTAMGAGP

SEQ ID NO: 81761 - protein, 107 aa, Zea mays
  Coding DNA Sequence Number=SeqID_39982
MELQSALSGPLLTLRDGTVAEMDEIASATALTADDSLRRDSCHQRRDSCLDGWIAPQENEEEIEVTEEKTPPPSESQAGNCFYFDICGSEPDSPTNEGKPRCICHLP

SEQ ID NO: 81762 - protein, 102 aa, Zea mays
  Coding DNA Sequence Number=SeqID_39983
MELQSALSGPLLTLRDGTVAEMDEIASATALTADDSLRRDSCHQRRDSCLDGWIAPQENEEEIEVTEEKTPPPSESQAGKIVSTSISAGPEPDSPTNEGKPR

SEQ ID NO: 81763 - protein, 312 aa, Zea mays
  Coding DNA Sequence Number=SeqID_39984
MEEWRKEDAGRWDRVMNRLDRLIQKSEVVDDVQQTIPIQSRLAAEVATEWTVLARQMKETKARDMEMWPENRVGWIHGLVNEDVSMAPLVFDEMPHNSSEAVVVLFPEDSDSLVFSELVGLKVAWDEEMQSETHMHEGLLKQLARGGEDLEESASKDAYVEDEASRPDSPSEATAVVKNGGSMEELLPARADSVLEDSLEKEQNAEDQAAVSKVEEVGTAAENADVIGAGGIFSQVLALESTAEFNGAGSSEAVKQILKELAECFSNGSISREFISSRVGQIIFDESDADEDEDDEGEEKVFGSSDPYLQHD

SEQ ID NO: 81764 - protein, 697 aa, Zea mays
  Coding DNA Sequence Number=SeqID_39985
  Homolog annotation: Hit_ID=P28551; Match level="QueryCoverage=16%, HitCoverage=32%, E-value=3e-24, Identity=51%"; Hit description =Tubulin beta chain
  Pfam annotation: Domain name=Vps16_N; Domain location=136-472; Score=- 186.5; E_value=0.043; Accession=PF04841.4; Description=Vps16, N -terminal region
MEEWRKEDAGRWDRVMNRLDRLIQKSEVVDDVQQTIPIQSRLAAEVATEWTVLARQMKETKARDMEMWPENRVGWIHGLVNEDVSMGLLHRVLEVWPLCLLEVEKILEESASKDAYVEDEASRPDSPSEATAVVKNGGSMEELLPARADSVLEDSLEKEQNAEDQAAVSKVEEVGTAAENADVIGAGGIFSQVLALESTAEFNGAGSSEAVKQILKELAECFSNGSISREFISSRVGQIIFDESDADEDEDDEGEEKVFGSSDPYLQHDFSPARSNSFSLLKLVVTAYPTEERTGEELEIGLGQKMAVAIIGKLLADSVLSLEQIVWSRLDSVSIYWPEVLLMIGPYGGLVQYKYGEPTKHIPECDGVRILFNSSMRVIHRASVLTTSFVGIGSKILAAFLYDVHDQCARQNKDSVRYGITGLTQWWLKAFSQGNSDMAVPSQPNVQRKSMNKLRGLQFRMVYNKGKENIVDDTFSPVGSLMARNGVLAVQLPSSVVTDFYAQDMLPIVIIHSPYGTVFSASQYSSLGCFSFNVFYGYETLVWAAIVLKGNRDPRMVAWTQHMTAASSMFKEPLVRAQQLIEGVEERILFNNDTLKLATPFFGVLNHLISATMSGVVCCLPLLGQRNSDFQKPAVNLISFSHFHFFQLISRGTKQFCNPIECDSTNMMSAANPRHGCYFTAPVMIHGKMSTKWMSKS

SEQ ID NO: 81765 - protein, 81 aa, Zea mays
  Coding DNA Sequence Number=SeqID_39986
  Subcellular localization annotation: CTP_CleavageSite=64; ConfidenceScore=5.03e-01
MACGQSAGCGGRDRVTASGVVPHGGGGVPVSAGAETTDQRVQPRISLNSPMFVQILNNRGVLVGSSTKRKRRGEVVPSGPR

SEQ ID NO: 81766 - protein, 505 aa, Zea mays
  Coding DNA Sequence Number=SeqID_39987
  Homolog annotation: Hit_ID=Q8RZ91; Match level="QueryCoverage=20%, HitCoverage=11%, E-value=3e-21, Identity=53%"; Hit description =Vacuolar protein sorting-associated protein VPS16-like
MAVAIIGKLHADSVLSLEQIVWSRLDSVSIYWPEVLLMIGPYGGLVQYKYGEPTKHIPECDGVRILFNSSMRVIHRASVLTTSFVGIGSKILAAFLYDVHDQCARQNKDSVRYGITGLTQWWLKAFSQGNSDMAVPSQPNVQRKSMNKLRGLQFRMVYNKGKENIVDDTFSPVGSLMARNGVLAVQLPSSVVTDFYAQDMLPIVIIHSPYGTVFSASQYSSLGCFSFNVFYGYETLVWAAIVLKGNRDPRMVAWTQHMTAASSMFKEPLVRAQQLIEGVEERILFNNDTLKLATPFFGVLNHLISATMSGVIASVPEQANKSATLKVQPTDQSYGRQTTGARSGRAVQHGAGAPAYTFPVVTPAGLREHGRGGREGSTRDELPSAEGRGHRTGGGIRETGSGRAMACGQSAGCGGRDRVTASGVVPHGGGGVPVSAGAETTDQRTVIGPLNLRCSGVLILRESGMAYLWPMQWGHWNTVLKASPRHPGGGPTPRRVGRLPFLGAA

SEQ ID NO: 81767 - protein, 198 aa, Zea mays
  Coding DNA Sequence Number=SeqID_39988
MAHRSYSGPTEAFSPPFYSLYPWIHGLFPTTEFVVVPSPSLPNSGDPGATLARASLNSGDLTAAKRSDAARSHSTPSVCALSPSVADTPSPPVSARPLARAPSAVDLISAIGFRSDGPYNEQSEVPECVVGDLPEQQLGEGNVSLAIHLGSEEWVRTTQAGKGSRLVGKVYNLCRVLKTGGDAGNMDDFEEFQEYDEF

SEQ ID NO: 81768 - protein, 157 aa, Zea mays
  Coding DNA Sequence Number=SeqID_39989
MAHRSYSGPTEAFSPPFYSLYPWIHGLFPTTEFVVVPSPSLPNSGDPGATLARASLNSGDLTAAKRSDAARSHSTPSVCALSPSVADTPSPPVSARPLARAPSAVDLISAIGFRSDGPYNEQSEVPECVVGDLPEQQLGGDAGNMDDFEEFQEYDEF

SEQ ID NO: 81769 - protein, 252 aa, Zea mays
  Coding DNA Sequence Number=SeqID_39990
  Gene Ontology: Mol. function=cysteine-type peptidase activity; Biological process=proteolysis
  Homolog annotation: Hit_ID=Q53MK8; Match level="QueryCoverage=60%, HitCoverage=15%, E-value=4e-13, Identity=28%"; Hit description=Ulp1 protease family, C-terminal catalytic domain, putative
MEKLDHNDMTIRASPGKELKITKDTVHLILGLPNAGGGTALGIDEVVAANNLRAELGLSKEDFGVTALQDRLRKGSDDDLSIRCFFLILFNRLLFPTASWGITNHEVLLTEEMDRFHQMVWCQLIFNDLCQAAKKWHNRSVTNVSTTIYGCSIVILHKTRTNTFDVPRPDPSGQHSIHIELPLIRDLISSKLNQLPSRHRMGFIEKLSHFDAEVGKACSVIKQTLQQIVEKQFNLSDVFGELIDEVLRAEAG

SEQ ID NO: 81770 - protein, 344 aa, Zea mays
  Coding DNA Sequence Number=SeqID_39991
  Gene Ontology: Mol. function=cysteine-type peptidase activity; Biological process=proteolysis
  Homolog annotation: Hit_ID=Q53MK8; Match level="QueryCoverage=71%, HitCoverage=26%, E-value=1e-21, Identity=27%"; Hit description=Ulp1 protease family, C-terminal catalytic domain, putative
  Subcellular localization annotation: CTP_CleavageSite=25; ConfidenceScore=5.06e-01
NRGGGCAAPAFSYSSETETSIFSTAAAERRVPYPVARGVSNSAALQANPHSGTSVMKNVDRPPSNPKWIIIQSTQECFSVDIPRAPVGTVRPETRHAADEDDDFMPLSKKRNLDDSPGKVLKKVVTKRRKAVPPLRQRLNVRCNPQDVLVSIQILNDRQQQAIARRGFSSILDMRLDTLGSRSHLAWLMEKLDHNDMTIRAGPGKELKITKDTVHLILGLPNAGGGTALGIDEAVAANNLRAELGLSKEDFGVTALQDCLRKGSDDDLSIRCFFLILFNRLLFPTASWGITNHEVLLTEEMDRFHQMDWCQLIFNDLCQAAKKWHNRSVTNVSTTIYGCSIVIL

SEQ ID NO: 81771 - protein, 82 aa, Zea mays
  Coding DNA Sequence Number=SeqID_39992
  Gene Ontology: Mol. function=isoleucine-tRNA ligase activity; Biological process=tRNA aminoacylation for protein translation
  Homolog annotation: Hit_ID=Q6ZGC2; Match level="QueryCoverage=63%, HitCoverage=4%, E-value=3e-19, Identity=92%"; Hit description =Putative isoleucyl-tRNA synthetase
EDRPAGGQGGLRPGPGAAATAPAPAPAPTAFVLHDVPPYANGDLHMGHALNKILKDFINRYKLLQNHKVSFVPGFGIATAFQ

SEQ ID NO: 81772 - protein, 183 aa, Zea mays
  Coding DNA Sequence Number=SeqID_39993
  Homolog annotation: Hit_ID=Q6ZGC2; Match level="QueryCoverage=28%, HitCoverage=4%, E-value=3e-19, Identity=92%"; Hit description =Putative isoleucyl-tRNA synthetase
MDEERKDHSICQELPVARRSPLRPMLARDVQAVGLALAVLGTGTRPHPPPYWIRKETHIWKKKFTQPIRKKYAAKAWDAAASARGRRTGGRADLVGRDLGREDRPAGGQGGLRPGPGAAATAPAPAPAPTAFVLHDVPPYANGDLHMGHALNKILKDFINRYKLLQNHKVSFVPGFGIATAFQ

SEQ ID NO: 81773 - protein, 79 aa, Zea mays
  Coding DNA Sequence Number=SeqID_39994
MDEERKDHSISQELPVARRSPLRPMLARDVQAVGLALAVVIGLWGTGGRAVGAPAGAPPWCLVAAAMPSTWARRTTGLR

SEQ ID NO: 81774 - protein, 43 aa, Zea mays
  Coding DNA Sequence Number=SeqID_39995
MDEERKDHSISQELPDARRSPLPPMLARDVQAVGLALAVTGLR

SEQ ID NO: 81775 - protein, 271 aa, Zea mays
  Coding DNA Sequence Number=SeqID_39996
  Homolog annotation: Hit_ID=Q6QP51; Match level="QueryCoverage=47%, HitCoverage=52%, E-value=1e-12, Identity=40%"; Hit description =Putative growth-regulating factor 1
MTLGTSDTWPRLGLRSRGTLGHFRDQQERFCNGIPSEGGIEPSDHIKRDQVRQITCRGSGAALANPAPAKPLTASTNQPENSEPDHALGLRSDRMREQPGIPPTLLNSAGNHHQRKLQRLMGAIQESSAARPSPTAVPPARVRLTAAESSLRRHRKLRLAQPWASTSGEVSASPDPRARPPPRPRKMDSASPDPRARPRPRPTPGLGLDLDLARNRVLARPRPRPQEESPPRPISGSDRPHRRGYIITLPLASSGYGEQDRRPIQARPGNK

SEQ ID NO: 81776 - protein, 116 aa, Zea mays
  Coding DNA Sequence Number=SeqID_39997
MSCEFNDYYIKDYGVILAPEQYANVSGREEPEPYVHANVAVGEVLKPCACDVVAVRGALEPCRSTAVGAVGTLLKSPCFRMGLRAAVVMGARGEPSLLVTEASLDGTPVLFPRSLS

SEQ ID NO: 81777 - protein, 85 aa, Zea mays
  Coding DNA Sequence Number=SeqID_39998
MGGAAPAKKLRRSAMAEDERMWFSREKKGSLLVGSRGGGERWRPWRGREGRWRGGERGEGGLPFIELELWTWQTAPAGGRFYNFY

SEQ ID NO: 81778 - protein, 142 aa, Zea mays
  Coding DNA Sequence Number=SeqID_39999
MGGRSSVCPRRWVPWMGERKDIAPWLRARGAGSSQGSAAMEDVGAGRSSTPREKGACSRCWTREEEETRWREGEGRGWAAIYRAKLWTCQTTPGGGKCCSDDLGRRVLAFSAWNRILVAAQNILLDLYSTNHVQHVRFYNFY

SEQ ID NO: 81779 - protein, 47 aa, Zea mays
  Coding DNA Sequence Number=SeqID_40000
MSCASDDYYIKDYDIILAPEVWHMLFNDETMQIVAYIEVCIIPMVAI

SEQ ID NO: 81780 - protein, 51 aa, Zea mays
  Coding DNA Sequence Number=SeqID_40001
MDIMVDQFEHCASAKIFQGDLMVVANVDDSQVVLDTASDDDAITLSSSSST

SEQ ID NO: 81781 - protein, 155 aa, Zea mays
  Coding DNA Sequence Number=SeqID_40002
  Gene Ontology: Mol. function=protein phosphatase type 2C activity; Cellular component=nucleus
  Homolog annotation: Hit_ID=Q2HW33; Match level="QueryCoverage=71%, HitCoverage=31%, E-value=2e-15, Identity=52%"; Hit description =Protein phosphatase 2C-like
MNPCFLLQTPNKLHEQEALTLSSLIDDEKKLGDWGPHGCRQRRRLSGCSGHRIRRRRHHAVQLIVHLKPNLPHKSLLTGHKFFQGYYLADEPEVHFVWQPNQESSVLVISRAFDDYYIEDCGIILAPEVTQRRIDNSDQFVILVTVRVAFVSVCL

SEQ ID NO: 81782 - protein, 270 aa, Zea mays
  Coding DNA Sequence Number=SeqID_40003
MKMREDVVLHIGLFVLKLSGGVFASLGTMNQQEAPTGVGEFLRDFGVPVVLWRLLQEVGYTEAPKYQWSRTVLRGQPWYEVVVRIPERARKPSWPYWMFHAEGMTPWEGAQVAALEVLTTICYQKWEEIQATSMRMFPVVALSDPFVYHHQARLMESISIGQDSVESASARVLMAVLELQLTQGHNRQKWQQLYTGSYAAFKMMEMAKNSACTQAQERLEETKVQAEQVIGLEHQVTELQMQYQADQNRIKELEHQLTNAHSKLKILSQQ

SEQ ID NO: 81783 - protein, 134 aa, Zea mays
  Coding DNA Sequence Number=SeqID_40004
MAKNSVCTQAQERLEETKVQADQVIGLEHQVTELQMQHQADQNRIKVLEHQLTNAHFKLKILSQQQEEICLHAVAVREDLKETMSFISHQDQAIKELNRAHPMEFQVAQRLVNHLQQAVHRLNAAFDPTPASVD

SEQ ID NO: 81784 - protein, 315 aa, Zea mays
  Coding DNA Sequence Number=SeqID_40005
MKTTRRTLEGPHVPWSTELKHAILRRPFRIPHGSGLRTGSQFRAPDMKVGRSDSLGAALENEIPFRRVSYKSCGSDNLGTRVREWALVSWGGPEPVQPLSLVPYRGPARSTALRQGGLEPVWPVSLVPYPKSCTLHHSVAGMNYAAPARVALEAGLGQPHQRRRPPLHRRIANDGDHLCTSNDNDLRSERLASSSDHLRRRQPPLQWVASPAEATMIAPPVEATTSAPMGSSCPNTHEEVLAPVLTAGVRTRPSKNATAAPTAYDVLYDLPVRSVARENEKHRSYEHKSIKHSGFKIPHQMACSKCYESSAVLSL

SEQ ID NO: 81785 - protein, 168 aa, Zea mays
  Coding DNA Sequence Number=SeqID_40006
MGSGCPNTHEEVLAPVLTVGVRTRPSKNATAAPAAYDVLYDLPPRSAPAAGGSAGGGTRATQAEEPDTRQLTAPQTPGPAYPEFASSARPTNALLPQMLEEEADRQPTQKAKLPLGSPSSLVWMMNILEAEGRERPQPSSLLSTTRLVVILVDDHRPEVATGLHDENP

SEQ ID NO: 81786 - protein, 82 aa, Zea mays
  Coding DNA Sequence Number=SeqID_40007
MVPPEVAAMRAGPSGTANGGPYGELDLFGAPPSMNLVDERVKWQEIDFNNTKEEVNLKDHETPTIWSSPKPIHRSLSRHRSP

SEQ ID NO: 81787 - protein, 133 aa, Zea mays
  Coding DNA Sequence Number=SeqID_40008
  Subcellular localization annotation: CTP_CleavageSite=30; ConfidenceScore=5.37e-01
MARVACTLRGKRLDSGVSMLSVMKQSTFVVSARRWCQRRRQITKALARVAELSASLKNLQVYHNTLHEEVHVLYDRLHPMVPPEVAAMRAGPSGTANGGPYGELDLFGAPPSMNLVDERSPEADSEAAKDEQN

SEQ ID NO: 81788 - protein, 110 aa, Zea mays
  Coding DNA Sequence Number=SeqID_40009
MAMLVLTTFCGFHPLEMSTHPIGLFPAKKEDDPMWKDQVDHGKDLMGLVESTKITLDNREDLVIDLSTELVEKDLQVEQMANHIQELEDQVEGRDNTIDVLKDQLQNTQL

SEQ ID NO: 81789 - protein, 96 aa, Zea mays
  Coding DNA Sequence Number=SeqID_40010
MANHIHELEDQVEARDNTIEVLEDQLQNTQQQLEEANQHLDLHHQEIEAMEANEVNEDVDIEGGEEPEPASSLDTAGSTHPGGPPSLESSVASFVR

SEQ ID NO: 81790 - protein, 60 aa, Zea mays
  Coding DNA Sequence Number=SeqID_40011
  Gene Ontology: Mol. function=sodium:hydrogen antiporter activity; Cellular component=integral to membrane; Biological process=sodium ion transport
  Homolog annotation: Hit_ID=Q7XYX0; Match level="QueryCoverage=91%, HitCoverage=10%, E-value=5e-20, Identity=89%"; Hit description =Na+/H+ antiporter NHX6
MAVGALGLISRLNIGALELEDYLALGAIFSATDSVCTLQVLSQYETPFLYNLVFGEVWTS

SEQ ID NO: 81791 - protein, 477 aa, Zea mays
  Coding DNA Sequence Number=SeqID_40012
  Gene Ontology: Mol. function=sodium:hydrogen antiporter activity; Cellular component=integral to membrane; Biological process=sodium ion transport
  Homolog annotation: Hit_ID=Q5QIU6; Match level="QueryCoverage=96%, HitCoverage=97%, E-value=1e-123, Identity=79%"; Hit description =Na+/H+ antiporter precursor
  Pfam annotation: Domain name=Na_H_Exchanger; Domain location=22-375; Score=73.8; E_value=5.5e-19; Accession=PF00999.11; Description =Sodiumhydrogen exchanger family
MGLGAAMALALGDPPADYASIAAVGLFVALMCVCIVVGHLLEENRWMNESITALFIGLGTGAVILFASSGKHSRVLVFSEDLFFIYLLPPIIFNAGFQVKKKQFFRNFITITLFGAVGTLISFTVISLGALGLISRLNIGALELGDYLALGAIFSATDSVCTLQVLSQDETPFLYSLVFGEGVVNDATSVVLFNAIQNFDPGNISSAKLLNFIGSFLYLFGSSTILGVASGLLSAYTIKKLYFGRHSTDREVSIMMLMAYLSYMLAELLDLSGILTVFFCGIVNVTLYLAQCNRKVRGSQPTRCYVPYMILVIQVIVWWAGLMRGAVSIALAYNKFTRSGHTQQPSNAIMITSTISVVLFSTIVFGLLTKPLIRLLIPSRHLSREPSALSEPSSPKSFFEQLAANSPGHPDLENGISLRRPASLRFLLVSPARSVHHYWRKFDDSFMRPVFGGRGFVPFVPGSPTESSLPLLPGNEN

SEQ ID NO: 81792 - protein, 531 aa, Zea mays
  Coding DNA Sequence Number=SeqID_40013
  Gene Ontology: Mol. function=oxidoreductase activity; Cellular component=integral to membrane; Biological process=electron transport
  Homolog annotation: Hit_ID=Q5N7Z8; Match level="QueryCoverage=85%, HitCoverage=86%, E-value=1e-133, Identity=56%"; Hit description =Putative Cytochrome P450 71A1
  Pfam annotation: Domain name=p450; Domain location=55-524; Score =330.4; E_value=3.1e-96; Accession=PF00067.12; Description=Cytochrome P450
LGAKICGAELRGRVGVAPTPAFLALLLIAPLSGLLLFLSTGRKTPYGGDEGRRLPPSPRGLPLLGHLPLLGPLPHRKLWAMAQAHGPVMLLRFGRVPTVVASSAAAAQEVMKTRDLAFASRPRVRMAERLLYGRDVAFVPYGEHWRQGRRVCVLHLLSQRRVSSFRHAREQEVAAMLARVRRGGAPAVNLTAHIISYTNGIISRAAFGGIGYYDGPDGGGEKLAKLFADFEGLLGTVTVGEFVPWLAWVDALMGLDAKAARTSAQMDAFLEQVIADHRRRRRGGHREGGDDHRDFVDVLLDVNEDEAHAGGATFDDVAIKAIILDMFAAATDTSYTTLVWAMAELINHPREMRKVQDEVRAAVGGGGRVTEDHLEELRYLRCVIKETLRLRTPLPLLVPRETTVDTELLGYHVPAGTRVIVNAWAIARDPATWERADEFVPERFAGDDLTADYLMPGQDFRSVPFGAGRRGCPGVGFSVPTMELALASLLYHFDWELPAGVAAKLEMDEVNGLSVRRKAPLYLVAKAWSPQ

SEQ ID NO: 81793 - protein, 554 aa, Zea mays
  Coding DNA Sequence Number=SeqID_40014
  Gene Ontology: Mol. function=oxidoreductase activity; Cellular component=integral to membrane; Biological process=electron transport
  Homolog annotation: Hit_ID=Q8W0B6; Match level="QueryCoverage=78%, HitCoverage=84%, E-value=1e-128, Identity=56%"; Hit description =Putative Cytochrome P450 71A1
  Pfam annotation: Domain name=p450; Domain location=39-507; Score =316.5; E_value=4.9e-92; Accession=PF00067.12; Description=Cytochrome P450
MDVSAFLALLLIAPLSGLLLFLSTGRKTPYGGDEGRRLPPSPRGLPLLGHLPLLGPLPHRKLWAMAQAHGPVMLLRFGRVPTVVASSAAAAQEVMKTRDLAFASRPRVRMAERLLYGRDVAFVPYGEHWRQGRRVCVLHLLSQRRVSSFRHAREQEVAAMLARVRRGGAPAVNLTAHIISYTNGIISRAAFGGIGYYDGPDGGGEKLAKLFADFEGLLGTVTVGEFVPWLAWVDALMGLDAKAARTSAQMDAFLEQVIADHRRRRRGGHREGGDDHRDFVDVLLDVNEDEAHAGGATFDDVAIKAIILDMFAAATDTSYTTLVWAMAELINHPREMRKVQDEVRAAVGGGGRVTEDHLEELRYLRCVIKETLRLRTPLPLLVPRETTVDTELLGYHVPAGTRVIVNAWAIARDPATWERADEFVPERFAGDDLTADYLMPGQDFRSVPFGAGRRGCPGVGFSVPTMELALASLLYHFDWELPAGVAAKLEMDEVNGLSGSSRDEIRELNKSAYELAHTLICGVAAAVRTRSETGAPVLLVSLKSTIQYRTPILS

SEQ ID NO: 81794 - protein, 152 aa, Zea mays
  Coding DNA Sequence Number=SeqID_40015
MGKSKKGGNSSHHSGDKRKREPTPPSEDFGDSEYSEEFSSESEGSPAPASPPASSDDSDDSQGIAAEVWTHIRAVEHAGLEGSDESKYSSDEEDSSDSSEEGSGGDGADGDGGDGDGGSGSGSGKGGDGNGKGDGGGSDSKGSSKGSNKASG

SEQ ID NO: 81795 - protein, 152 aa, Zea mays; identical to SEQ ID NO: 81794
  Coding DNA Sequence Number=SeqID_40016

SEQ ID NO: 81796 - protein, 582 aa, Zea mays
  Coding DNA Sequence Number=SeqID_40017
  Homolog annotation: Hit_ID=Q6YWR4; Match level="QueryCoverage=42%, HitCoverage=71%, E-value=9e-63, Identity=57%"; Hit description =Putative homeodomain leucine zipper protein
  Pfam annotation: Domain name=HALZ; Domain location=42-86; Score=72.7; E_value=1.2e-18; Accession=PF02183.8; Description=Homeobox associated leucine zipper
  Pfam annotation: Domain name=Homeobox; Domain location=1-41; Score =36.6; E_value=8.9e-08; Accession=PF00046.19; Description=Homeobox domain
  Pfam module annotation: Pfam domain module=HALZ::Homeobox; Domain location=42-86::1-41
RSFEEENKLEPERKTELARKLGLQPRQVAVWFQNRRARWKTKQLERDFDRLKASFDALRADHDALLQDNHRLRSQVVSLTEKLREKEATEGDANGAAAALPAVGVVRASVADDVEEPEPEPEPEAEAAAFEERQVKSEDRLSTGSGGSAVVDAADALLYNGRIGGAAVDSSVESYFPGAEVQDQYHGCGTMGPVTHGAGGIQSDDDDGAGSDEGCSYYADEEAAAAFLSEHTHHADGDDEDAGQMKDMYREALWQKRGRPRELYPDVSSKDALVPPEFSVPNCDCGRLAWGHQMCFFFQWIDGPDKFDPRYLLFVNWLSGRTSHERFKRWVPPPPNPPPMTDAEKEVATERRMDSPPRCDCGDRVVIDENYEKQFCCPNIDYPYGWRKCRFREWLYGPLCHWPEPEVKEKRYNQWAEEEVKFDPVLCKCGIEAKYGLVPSELGVGYFCGHMVDYDEETRKCSWESYDNKGEVMRTIESKRIMGQKMRCGSRLVDSYINDRIRDMRREAKSAFYDSSKRAEYRRLKAADEKRAQDAREWEAAQAEKQMLDNLADRLKGKIGSGVNYLADEAHARYVQDKMATV

SEQ ID NO: 81797 - protein, 802 aa, Zea mays
  Coding DNA Sequence Number=SeqID_40018
  Homolog annotation: Hit_ID=Q6YWR4; Match level="QueryCoverage=41%, HitCoverage=97%, E-value=3e-87, Identity=57%"; Hit description =Putative homeodomain leucine zipper protein
  Pfam annotation: Domain name=HALZ; Domain location=129-173; Score =72.7; E_value=1.2e-18; Accession=PF02183.8; Description=Homeobox associated leucine zipper
  Pfam annotation: Domain name=Homeobox; Domain location=74-128; Score =79.8; E_value=8.4e-21; Accession=PF00046.19; Description=Homeobox domain
  Pfam module annotation: Pfam domain module=HALZ::Homeobox; Domain location=129-173::74-128
MESGRLIFNAPGSGAGQMLFLDCGAGGGPGGGLLHRGGRPMLGLEEGRGVKRPFYTSPDELLEEEYYDEQLPEKKRRLTPEQVHLLERSFEEENKLEPERKTELARKLGLQPRQVAVWFQNRRARWKTKQLERDFDRLKASFDALRADHDALLQDNHRLRSQVVSLTEKLREKEATEGDANGAAAALPAVGVVRASVADDVEEPEPEPEPEAEAAAFEERQVKSEDRLSTGSGGSAVVDAADALLYNGRIGGAAVDSSVESYFPGAEVQDQYHGCGTMGPVTHGAGGIQSDDDDGAGSDEGCSYYADEEAAAAFLSEHTHHADGDDEDAGQMKDMYREALWQKRGRPRELYPDVSSKDALVPPEFSVPNCDCGRLAWGHQMCFFFQWIDGPDKFDPRYLLFVNWLSGRTSHERFKRWVPPPPNPPPMTDAEKEVATERRMDSPPRCDCGDRVVIDENYEKQFCCPNIDYPYGWRKCRFREWLYGPLCHWPEPEVKEKRYNQWAEEEVKFDPVLCKCGIEAKYGLVPSELGVGYFCGHMVDYDEETRKCSWESYDNKGEVMRTIESKRIMGQKMRCGSRLVDSYINDRIRDMRREAKSAFYDSSKRAEYRRLKAADEKRAQDAREWEAAQAEKQMLDNLADRLKGKIGSGVNYLADEAHARYVQDKMATVELMEEKEDDTSRLSELITLAEAGLHEEEEDDTSRLSELIALAEAGLRAQEEEDEFMSQAAEEVEAANYKKKSDEAEAEDELFSQAADEAEANYYKRTGDKCDAGQCSKWNEVVVEDCATDDSEDELLIDCDSD

SEQ ID NO: 81798 - protein, 285 aa, Zea mays
  Coding DNA Sequence Number=SeqID_40019
MPKEYDSLDQAPVSETGPLFSAEMKRRTTAGGGSLLAWRFAFFALRDPHTSYMTCRPGPPCQRLGCFGARRARFSAASWGASGRVFHEKGFTPRAAVTLSHSLHSLRPFAFEFSAPLCIRVPLLLATVVAMALLAHPECFQYEGALNLVHNLLGWARRRSPEGSALAPLPSAISPPGRARPPASAPHPQSILKAIFAHLCEMFVGVVLFRQCADERMLRIELPKMESELSCDSFHRMNSIASCSGLVSSSLGFTRISWVCGRLAPSGCGGSGAMTTLSKDAHVWW

SEQ ID NO: 81799 - protein, 117 aa, Zea mays
  Coding DNA Sequence Number=SeqID_40020
MEDDSWARGPHVKGWAVGFGGGEETHYRRCWRAPHAAVRLLRTRRPTPKEYDSWARAPAPGAGPLLSTEMKRRTTADGGVLLTRWFAFSAHGDRRPRSMTRGPRPPCQRLGRCFRRR

SEQ ID NO: 81800 - protein, 161 aa, Zea mays
  Coding DNA Sequence Number=SeqID_40021
MSGNMVTGKPSTRVKPGADFIPHATWDWVSHASYGGYKCSHCTAAAGVSGALYAKAVRPGRERGIDGDEGENVVKILMLEIEKLKLILDTASAFGKLNPSAKQLHGLEVEEWFPPTGKRGISCGLKKKLSLKLRILPTENNFYFDIYGVDPRISCNPRQAP

SEQ ID NO: 81801 - protein, 103 aa, Zea mays
  Coding DNA Sequence Number=SeqID_40022
MSGNMVTGKPSTRVKPGADFIPHATWDWVSHASYGGYKCSHCTAAAGVSGALYAKAVRPGRERGIDGDGTLQDMVDGVTWPTTLPPGWMVQWDATPTGEEQEE

SEQ ID NO: 81802 - protein, 206 aa, Zea mays
  Coding DNA Sequence Number=SeqID_40023
  Homolog annotation: Hit_ID=Q768R3; Match level="QueryCoverage=28%, HitCoverage=10%, E-value=2e-19, Identity=77%"; Hit description =Plastidic general dicarboxylate transporter
MHVMRCPLCKRNSCRGEHVDGAGTGNVSCPATAGNKQILDARHYELFLEKAYWDETLEYESLGEHFQDEEVAAALCVVVNAKQFASPSTTSVLNRAWTGKHDDPMTRHCASATAAAIHTNLQSNGVKTFFAITLHGTANSHFSSVVWKASANSNALFLTAGVQNLLCLKLGEDNGVNIGNPWITWFEVASVPALFGLLVTPYLIYS

SEQ ID NO: 81803 - protein, 264 aa, Zea mays
  Coding DNA Sequence Number=SeqID_40024
  Homolog annotation: Hit_ID=Q7XCJ7; Match level="QueryCoverage=30%, HitCoverage=20%, E-value=2e-30, Identity=76%"; Hit description =Protein phosphatase 2C, putative, expressed
MTRHCASATAAAIHTNLQSNGGLLSTFEAMRDTARDEQIVSVRISQVSFVFFHSVCCIVLIKLAKGRAKFGDSSTEALAGRYEVDGYVYSAAEELKIMITGKWNKSLSCQPCDQEGDPLPGMELKEIIRSIGDVYMKKPEFNREPLHNKFRLQETFRRPLLSSDLAITVHQIQPTDKFIIFASHGLWEHLSNQEVVDMVQSSPCNHVLSSFKVLFMEFCDSVLDLGLSNRELQLAGLDSRRCKAAGLGSERSVGCSCCRSSGRG

SEQ ID NO: 81804 - protein, 64 aa, Zea mays
  Coding DNA Sequence Number=SeqID_40025
MGMGMGTVSRPIGLVGMDICKSLGYNFGSGTLQDMVDGVTWPTTLPPGWTVEWDAAPAGEEQEE

SEQ ID NO: 81805 - protein, 78 aa, Zea mays
  Coding DNA Sequence Number=SeqID_40026
MACLHELFLDRLLLYNNISTGYPIPGGYPMGMDTGTVSRPIGLVGMDICRSLGYNFGSGGCGLLLPGMRYGGWASDIC

SEQ ID NO: 81806 - protein, 81 aa, Zea mays
  Coding DNA Sequence Number=SeqID_40027
  Subcellular localization annotation: CTP_CleavageSite=45; ConfidenceScore=5.13e-01
MANGPKTDFRARPRKRARGWARDPPMVPPRETWKFGSTREGKRVSSAEPRTPSRPSRGRSAPYRAQLRLALLAAWPAMVRP

SEQ ID NO: 81807 - protein, 86 aa, Zea mays
  Coding DNA Sequence Number=SeqID_40028
MANGPKMDFRARPRKRARGWARDPPVVPPRETWKFGSTREGKRNSLKSWEGVSSAEPRTPSRPSRGRSAPYRAQLRLALLAAWPAM

SEQ ID NO: 81808 - protein, 89 aa, Zea mays
  Coding DNA Sequence Number=SeqID_40029
MANGPKMDFRARPRKRARGWARDPPVVPPRETWKFGSTREGKRNSPKSWEGVSSAEPRTPSRPSRGRSAPYRAQLRLALLAAWPAMVRP

SEQ ID NO: 81809 - protein, 89 aa, Zea mays
  Coding DNA Sequence Number=SeqID_40030
  Subcellular localization annotation: CTP_CleavageSite=39; ConfidenceScore=5.14e-01
MANGPKTDFRPRPRKRARGRARDPPVVPPRETWKFGSTREGKRNSPKSWEGVSSAEPRTPSRPSRGRSAPYRAQLRLALLAAWPAVVRP

SEQ ID NO: 81810 - protein, 86 aa, Zea mays
  Coding DNA Sequence Number=SeqID_40031
  Subcellular localization annotation: CTP_CleavageSite=39; ConfidenceScore=5.13e-01
MANGPKTDFRPRPRKRARGRARDPPVVPPRETWKFGSTREGKRNSPKSWEGVSSAEPRTPSRPSRGRSAPYRAQLRLALLAAWPAV

SEQ ID NO: 81811 - protein, 89 aa, Zea mays
  Coding DNA Sequence Number=SeqID_40032
  Subcellular localization annotation: CTP_CleavageSite=39; ConfidenceScore=5.17e-01
MANGPKTDFRPRPQKRARGRARDPPVVPPRETWKFGSTREGKRNSPKSWEGVSSAEPRTPSRPSRGRSAPYRAQLRLALLAAWPAVVRP

SEQ ID NO: 81812 - protein, 106 aa, Zea mays
  Coding DNA Sequence Number=SeqID_40033
MANGPKTDFRARPRKRARGWARDPPVVPPRETWKFGSTREGKWVTLAKPLILSKNAVSSHLRWVSWGPGKMPWFSEGRTPRSPGRGSPRPSPVSHPVLEGKPNANH

SEQ ID NO: 81813 - protein, 128 aa, Zea mays
  Coding DNA Sequence Number=SeqID_40034
MANGPKTDFRARPRKRARGWARDPPVVPPRETWKFGSTREGKRVTLAKPLILSKNAVSSHLRWVSWGPGKMPWFSEGRTPRIPGRGYAPQVSSAEPRTPSRPSRGRSAPYRAQLRLALLAAWSAMVRP

SEQ ID NO: 81814 - protein, 128 aa, Zea mays
  Coding DNA Sequence Number=SeqID_40035
MANGPKTDFQARPRKRARGWARDPPVVPPRETWKFGSTREGKRVTLAKPLILSKNAVSSHLRWVSWGPGKMPWFSEGRTPRSPRRGYAPQVSSAEPRTPSRPSRGRSAPYRAQLRLALLAAWPAMVRP

SEQ ID NO: 81815 - protein, 128 aa, Zea mays
  Coding DNA Sequence Number=SeqID_40036
MANGPKTDFRARPRKRARGWARDPPVVPPRETWKFGSTREGKRVTLAKPLILSKNAVSSHLRWVSWGPGKMPWFSEGRTPRSPRRGYAPQVSSAEPRTPSRPSRGRSAPYRAQLRLALLAAWPAMVRP

SEQ ID NO: 81816 - protein, 289 aa, Zea mays
  Coding DNA Sequence Number=SeqID_40037
MNRYAIWAAGSAANGRDLMKRDPTDYHTIRHQRRRINHAKDKHMTTGRINQVARPRRRASAGLRAEASCRAGRRSFGRTDSWARDANASPAFSVSHIRDQKRQRGVLGAAGHRRTAERGKRRGRSRADEPHPGGALDEGNVYRVWLPVGRVAARKHFSTQQAQDARTNDGTRAPGVGRTAAGVLQAVTGPRQLMRQRSRYGRAIQSIPPRWAGRVYLRGRRPKVHRAREKRKTHRAMGHPTVQPLVQGVWPALASHSRSWLRHGPNHGRPGSQQRQLELGAVGCRPGHG

SEQ ID NO: 81817 - protein, 242 aa, Zea mays
  Coding DNA Sequence Number=SeqID_40038
  Subcellular localization annotation: CTP_CleavageSite=54; ConfidenceScore=5.07e-01
MACFEHSNFFKVTAPEARPGQLRPGAHRRQKGRADKHMTTGRINQVARPRRRASAGLRAEASCRAGRRSFGRTDSWARDANASPAFSVSHIRDQKRQRGVLGAAGHRRTAERGKRRGRSRADEPHPGGALDEGNVYRVRLPVGRVAARKHFSTQQAQDARTNDGTRVPGVGRTAAGVLQAVTGPRQLMRQRSRYGRAIQSIPSRWARRGVWPALASHSRSWLRHGRTMAGQAANSASWSWAR

SEQ ID NO: 81818 - protein, 90 aa, Zea mays
  Coding DNA Sequence Number=SeqID_40039
MKNVAKCDTWCELQNPANHRVFERKLRPKPSGGGHVCLGVTPKDTPNTPPRGEGRGVWPPAPQGERPGARPAIRPYGSIERPSLSSDRDP

SEQ ID NO: 81819 - protein, 232 aa, Zea mays
  Coding DNA Sequence Number=SeqID_40040
MKNVAKCDTWCELQNPANHRVFERKLRPKPCGGGHVCLGVTPKDTPNTPPRGEGRGVWPPAPQGEVGRSRGCRRTAPDAARGGRHQVVLGAASRRAAGHSALRTHRATELALGPRPQGSGWGLATRTGRMRNGSCWSADRLGAWTVVARAGGQSPGALGAPGSRRRRGRYPRASGSPLGALRRNGLRAPHPTRLETRTKESDMRASRRVQKPEMRKEADEREALTGRTAGRP

SEQ ID NO: 81820 - protein, 620 aa, Zea mays
  Coding DNA Sequence Number=SeqID_40041
  Homolog annotation: Hit_ID=Q8TGM6; Match level="QueryCoverage=12%, HitCoverage=62%, E-value=1e-11, Identity=58%"; Hit description =Protein TAR1
MAHLELPIPWHGSPEQPCRPTYLKRAPTRTLHRRSGSASGAAHEGLPLVSFLAHPRPLRRSAPRGAPEARGYRPRQRRLPGAPRAPGLWPPARATTVHAPSRSADQQEPFRIRPVRVASPHPLPSRQFQALFDSLFKVLFIFPSRYLFAIGLSPVFSLGRSLPPDLGCIPKQPDSLTAPRGATGSGPDGALTLPGVPFQRTWARSVAEDDSPDYNSGGEAARFSSWAAPGSLAVTRGILGRMAGRAPGRCTENNLMSPTTCCARRGSPAAPASAHLALRRGGPDATSLAPRGGVGSVFWRDAQADVPSARRLRAQLAFKNSMVRGILQFTPGIAFCYVLHRCESRDIRCRESCRLRCNRCPGSGRRADRSVGQEVVLVFLGARGAMGSFSRSPFPAGGSGGGQRAGPEPGGTDKHMTTGRINQVARPRRRASAGLRAEASCRAGRRSFGRTDFWARDANASPAFSVSHIRDQKRQRGVLGAAGHRRTAERGKHCGRSRADEPHPGGALDEGNVYRVRLPVGRVAARKHFSTQQAQDARTNDGTRAPGVGRTAAGVLQAVTGPRQLMRQRSRYGRAIQSFPPRWARRGVWPALDSHSRSWLRHGRTMAGQAANSASWSWAR

SEQ ID NO: 81821 - protein, 73 aa, Zea mays
  Coding DNA Sequence Number=SeqID_40042
MAEASFHVFDASWHPGARSEHARAADDPRRLVLVASVAPTTSDTDPHTDMTVDTSRTSLTTPPELYCAGSPTT

SEQ ID NO: 81822 - protein, 95 aa, Zea mays
  Coding DNA Sequence Number=SeqID_40043
MAEASFHVFDASWHPGARSEHARTRVTGIAQSCSPEFKNPPAHVDREPPTTPAACARGQGSSDHLRHQPAHRRDRCDLPDVTDHPAGALLPPIAK

SEQ ID NO: 81823 - protein, 95 aa, Zea mays
  Coding DNA Sequence Number=SeqID_40044
MAEASFHVFDASWHPGARSEHARTRVTGIAQSCSPEFKNPPAHVDREPPTNPAACARGQGSSDHLRHQPAHRRDRCDLPDVTDHPAGALLPPIAK

SEQ ID NO: 81824 - protein, 95 aa, Zea mays
  Coding DNA Sequence Number=SeqID_40045
MAEASFHVFDASWHPGARSEHARTRVTGIAQSCSPEFKNPPAHVDREPPTTPAACARGQGSSDHLRRRPAHRRDRCDLPDVTDHPAGALLPPIAK

SEQ ID NO: 81825 - protein, 140 aa, Zea mays
  Coding DNA Sequence Number=SeqID_40046
MAEASFHVFDASWHPGARSEHARTRVTGIAQSCSPEFKNPPAHVDREPPTTPAACARGQGSSDHLRRRPAHRRDRCDLPDVADHPAGALLPPGLGRTPYPHTLTVPPKPEFIGLFPEHDAPLPAKPPELRPPCPAHPSHS

SEQ ID NO: 81826 - protein, 95 aa, Zea mays
  Coding DNA Sequence Number=SeqID_40047
MAEASFHVFDASWHPGARSEHARTRITGIAQSCSPEFKNPPAHVDREPPTTPAACARGQGSSDHLRHRPAPRRDRCDLPDVTDHPAGALLPPIAK

SEQ ID NO: 81827 - protein, 95 aa, Zea mays
  Coding DNA Sequence Number=SeqID_40048
MAEASFHVFDASWHPGARSEHARTRITGIAQSCSPEFKNLPAHVDREPPTTPAACARGQGSSDHLRHRPAPRRDRCDLPDVTDHPAGALLPPIAK

SEQ ID NO: 81828 - protein, 150 aa, Zea mays
  Coding DNA Sequence Number=SeqID_40049
MAEASFHVFDASWHPGARSEHARTRITGIAQSCSPEFKNLPAHVDREPPTTPAACARGQGSSDHLRHRPAPRRDRCDLPDVTDHPAGALLPPDNLEKPYKNDPKCNLADGEYILVPEQGAAQEVAPDPAPEPAPEDLPATALEGKPRFYA

SEQ ID NO: 81829 - protein, 435 aa, Zea mays
  Coding DNA Sequence Number=SeqID_40050
  Homolog annotation: Hit_ID=Q5ZCG4; Match level="QueryCoverage=38%, HitCoverage=14%, E-value=4e-25, Identity=44%"; Hit description =Putative ATPase
MDIVVEEGNADVGNTVEPSYEVVARSGCSAQLSTNDTNEHELESEDSKVSVGNAAKQSHDVVGVGIDCIFNHVKVSTEADLGTQPDVIHLTSLDVPNESSQISSDADMVEQNKQDALDTLIRISQHKKPKKLNVARVVSEDYKCTPEDVQLIEYIKTLPGKQVVVDIDSAWLNKNDMECLFHGDIQVSGEALSAYIHCIRDEEHLLHREGGKSFLGSFVARQGCHPQVPKIGCLETPTVPVKAAWEQRKQVLNAVNQSCFEMPANTDCSEDLFQSHEDLQNQSRTSNLDNEHFPRDASNHANVEATGPPYDLSNGGISTQHSDWSEIKWGSTDEMLGNAGQDDDHFTPMGMFCLTNNTYILDISCIESNMGERMESIRNGNSSCLTMQEEHLQAECGGYPHPDYISVDMVDERSLHDLPHGLSQNNEQYEMEQLP

SEQ ID NO: 81830 - protein, 164 aa, Zea mays
  Coding DNA Sequence Number=SeqID_40051
  Gene Ontology: Mol. function=nucleic acid binding; Biological process= RNA processing
  Homolog annotation: Hit_ID=Q5ZCG4; Match level="QueryCoverage=95%, HitCoverage=13%, E-value=8e-26, Identity=44%"; Hit description =Putative ATPase
MVMAFADLQNQSRTSNLDNEHFPRDASNHANVEATGPPYDLSNGGISTQHSDWSEIKWGSTDEMLGNAGQDDDHFTPMGMFCLTNNTYILDISCIESNMGERMESIRNGNSSCLTMQEEHLQAECGGYPHPDYISVDMVDERSLHDLPHGLSQNNEQYEMEQLP

SEQ ID NO: 81831 - protein, 185 aa, Zea mays
  Coding DNA Sequence Number=SeqID_40052
MPTPSACASPPCRNRGRGGVDDLPRLSRVGAVLGKPTMLVGSGQEDRSREVHAEGGGAMPSSQVVVFTLLMLLKFWSWSSGQRDVRLRAQPHPRVIAQAARCRPAVNPWICISLMKLATVIMVSSLVLATMLRHHISTARGPPGNLQQVGYRRCERTDSPSLPRTAGCDPPLGSLFSVHSVSSSS

SEQ ID NO: 81832 - protein, 150 aa, Zea mays
  Coding DNA Sequence Number=SeqID_40053
MLVGSGREDRSREVHAEGGGAMPSSQVVVFTLLMLLKFWFWSSGQRDVRLRAQPHPRVIAQAARCRPAVNPWICISLMKLATVIMVSSLVLATMLRHHISTARGPPGNLQQVGYRRCERTDSPSLPRTAGCDPPLAPCSVFTQSAQAPES

SEQ ID NO: 81833 - protein, 90 aa, Zea mays
  Coding DNA Sequence Number=SeqID_40054
MACEPSDQNATAHDSPIYLRSSSGDKQDSTVALHQRNPQSKAPRPTRVLLGAKTPKQPLTIKEHEVPRVTNPHKVKFAMSSRTKRIGESR

SEQ ID NO: 81834 - protein, 112 aa, Zea mays
  Coding DNA Sequence Number=SeqID_40055
MPILANRKSQSRIQARTQDIRFYFEVRSHHKGVLLPIEEPTQGRVFSNPNPPQPDHQESFTVEVKFNSAEVKLNSAEVKFNPVEENLDLAEVKFNPVEEKLNSAEVKFNSTE

SEQ ID NO: 81835 - protein, 120 aa, Zea mays
  Coding DNA Sequence Number=SeqID_40056
MDNMNQPTNLKRLTRTHKNTQYNPRFGNHHKGVLLLVEKPTKGRVFSNPNPPQADHKGQGNLYSNKLKERVIQTSWGRPQIWETPKQPLTVKEHEVPRVTNPHKVKFATSSRTKRIGESR

SEQ ID NO: 81836 - protein, 100 aa, Zea mays
  Coding DNA Sequence Number=SeqID_40057
  Subcellular localization annotation: CTP_CleavageSite=69; ConfidenceScore=5.51e-01
MRWRYSGTWHKAVRRQSPAFLSVSTVVNMVRRPKLFIGRSLSPATYTGCYPLTPSTNWTGGDTNRGGNRSSAVKLLLWRPDPFGTLYHGDLHSVGLTVNL

SEQ ID NO: 81837 - protein, 184 aa, Zea mays
  Coding DNA Sequence Number=SeqID_40058
MGLPFRMGRGGGVAELRLYTQGATRGRCTEAENPRRVWRSPRGAIGKLLKTSPTCGPRGPERGRAGERGARDRPVGPESNSWILGLFAKWNLIEFYAKSEIRDMAQLWSFIAFKSVARDKLRPINNSGRRTMFTAVETDKNAGDCRRTALHHVSEHLRRGTVTLYTRLIIAGEFATTEDTNPLS

SEQ ID NO: 81838 - protein, 95 aa, Zea mays
  Coding DNA Sequence Number=SeqID_40059
MSMELLSKSYPTKEKTLKGMLVIRESSKAKHQNLFVKRVIKEEVPQVLILRSGTPLMSHGGGPTTGEVRWAGLRKDWRSRAAYTKSDPLRAFPLS

SEQ ID NO: 81839 - protein, 151 aa, Zea mays
  Coding DNA Sequence Number=SeqID_40060
MELLSKSYPTKEKTLKGMLVIRESSKAKHQNLFVKRVIKEGNQIQGRKRKRKEMNSPGLILARTGPTTAEACAPALAVLRKGPRLTDQSESSSTKLPHGKPNSGELYWPERAKTGANLWFTPDSTPKEYSPHSISELELYRTLSTGIVRRI

SEQ ID NO: 81840 - protein, 63 aa, Zea mays
  Coding DNA Sequence Number=SeqID_40061
MAPYTSHELPPLMVNTRKGGGIDLLANPHNWRIVRQQQAEMNPPNPPPAWIDLVVATQMQMLQ

SEQ ID NO: 81841 - protein, 108 aa, Zea mays
  Coding DNA Sequence Number=SeqID_40062
MAVRRGIPALELPINAMLSLSLNFVDQPYTSHELPPLMVNTRRGGRIDLPPNRHTRRIYRQPQPQPAGMNPPNPPPGGVDPLIAAQMAVMQQMADTMADMRAQMQQER

SEQ ID NO: 81842 - protein, 2083 aa, Zea mays
  Coding DNA Sequence Number=SeqID_40063
  Homolog annotation: Hit_ID=Q7XCF0; Match level="QueryCoverage=98%, HitCoverage=99%, E-value=0.0, Identity=51%"; Hit description =Expressed protein
MQRRQQQLTPYKLKCDKDPLNNKLGPPDFYPQTLNCPEETLTKDYVQYGYKETVEGIEEAREIVISQIPYFCKPDVVIKCKEALKKRLRAINESRAQKRKAGQVYGVPLSGSLLIKPGVYPEQRPCNEDTRRKWVEALAQPNKRLRSLSEHVPHGYRRKSLFEGLIRYNVPLLRATWFIKVTYLNQARPAPNSTSVVASDNQRSNQWTKDVVEYLQQILDEVCSKEGAIVPPSFKEQSSPGLAAGTNQIKMKTESSPAGDSEEPLVHFKWRYMVRLIQWHLTEELLVPSVLIEWLSNQLQERDSDDVLELLLPIILGLVDTITLSQTYVRMFVELLVRRLNVDRPKRFSVSSVIAELLRYMVLAVPDTFVSLDCFPFPSFVVPDVYGRGALLKITSGGGILCSKRRDAYRYLSCGYAVSSIQKRAHDLAAVANPSLQARGAAKVVQALDKALVTGNLSVAYFSLFNDLSDALMEERWIKEVNPCLQSSLMWIGTVELSLICSIFFLCEWATCDYRDCRASPSQNVKFTGRRDLSQIHMAVSILKNKMDEMNNLSRPKSSTRITLNKVAKGSLNDACLTAAAVDDSSGLRSNAKNVDEKKDTNDIFESPGPLHDIIVYVRQLIISGITDKNDTMLDVERKRRHHRTLKQLPGSSLFDVLEETRTAEEQQLYEMMSTYSSERRLVLSELSCGHSFYASGRGEYTSSSCIRKQSDLPVASEGDKHGRVLEQVEDVKALLSSLLGFTYPPLVESKLCEIKTSFQESVTSTLTQVETGEAKSGCEDCMRSKGQKLDDSATPFQGFPLIQSGEEDIWWVKKGTKLQESFNVEPVQKSVKQTSRGRAKVVRKTQSLAQLAAARIEGSQGASTSHVCESKMSCPHHEPNNDGDNVKDFDHTRAANVTAIGKSLKRLRLLERRSVSSWLLKSIRQLVDGNGMTASKATNSISILPLQPDDKTASKWRLGDEELLSVLYVLDTCCDSVSGVKFLIWLLVKIRGVGSSGQPGRTYMLMRNRDHQVCQVNEALVFSSLLRYENILLATDILPDVLSALVNRNSMSATTRHPGSTAFAYVRYFLKKYRDVASVAKWEKNFRTTCDQRLLAELDNGRSIDGDLVSSSGILAGEEIDEQVRQKLNGRSSRLVQNMKEIVQRQADGIQRSLKEKKVLAGAAPRNPLTFEKEDSYQIAHDIVLGLVECIRQNGGANPDGDLSIVASAVSAIVVNAGHMIAKHLDFAGGNYQGVNSVATSLNFVRHTLLIHINSLCLLKETLGDRFSRAFEIALAVETSAAVTAAFAPPKMHRNQFQPSPEAHDAYGNHTSELSNSGKGFVGRTAKVSAAISALVVGAVVHGAVSLERMVATLKIKDGLDIMQLLRDILGDPYIIALSRLQRMLPLTVIFPPAYSIFAMVLWRRYIFNCEDPQLYQSFSNAINDITRHQPFREIYFRNTHRLYNLLASDVGDSKFAAMLESHSPDRNSKILPFIPLRARLFLDAIIDCNTPTIQGDGASEPCDPKDNELKLSERLMQLLDTLQPAKFHWQWVEMRLLLDEQALMEKVAAGKTTLESLRSLSPKAEGFALSDSEKGFTEVILSRLLARPDAAPLYSELVHLLGKLQESLVMDVKWILQGQDAILGRRSTRQQLVHIAQRKGLSTKAQVWKPWGWSSLLSDAIPNKTAKRKLEVTSIEEGEVVDDTVDAKRTTKTPPHSVDRSFEGIRSINKYLTEKALAELVLPCIDRSSADIRGILSVDLTKQMGAISEHIKAIALNGAKQAGSVSSGNEVPSNKSSGRRGIRGGSPNIGRRAPVGNDPSPPSASALRAALWLRLQFIIRLLPVIMADRSMRHTLASAILGLLATRMIYEDADLPLPPTNATALRRDVDSLLEPPLDVLLDRPGESLFEKLLCVLHALLGSYKPSWLKSRSASRSSIKSQRDFSAFDNEAAEGLQSALDHMELPETIRRRIQAAMPLLPPSRRPCMQCQPPQLSLAALSPLQSSTSGVGPQQKSSCVSWVPTNVSVRSKAALPSHDPETEVDPWSLLEDGTNCPPSTASGSNGSSGVTGDHANLKASSWLKGAVRVRRTELTYIGSVDDDS

SEQ ID NO: 81843 - protein, 97 aa, Zea mays
  Coding DNA Sequence Number=SeqID_40064
  Subcellular localization annotation: CTP_CleavageSite=37; ConfidenceScore=5.33e-01
MARDLASSLFACCCAVPRRCLLCARRNVQQATRRRFPAAAPTSLRGSLLCVEQWTARRRCPPAVHVYVWMCVKHSIMHIGRIAFAIKEQAVVDVCDL

SEQ ID NO: 81844 - protein, 230 aa, Zea mays
  Coding DNA Sequence Number=SeqID_40065
MAARVFSPRVSTASRMGLRKNSKPPAGIDGVLSTAQHKAASRAETSGLLQEIDDAWLAAHFVEHIASTDGALRSSTQTGRKPGREPWRGCSRASAAARHGRGLRQRGEEGRAAAVESLLLEFLGTMGGRGGRAAARRGAGRTASSARQQGERARGEGLELGCRPWKLKGAPWETREAAAALEGERRRAPWWPRGGAAQGPSGPGRPCWNGARPGELLPAPAPGKERWGGR

SEQ ID NO: 81845 - protein, 123 aa, Zea mays
  Coding DNA Sequence Number=SeqID_40066
  Homolog annotation: Hit_ID=Q8H291; Match level="QueryCoverage=66%, HitCoverage=22%, E-value=4e-34, Identity=86%"; Hit description =Putative ATP/GTP binding protein
MIVVVIGEHKALEEGGELHGKTVYLFGSTEPQLLDVNGESKIVLIPIVVAVDCPFPPSDKIGINSVQRENEEIVPMKAMKMAWVPYVPLEDRYVFCYFSIHLYKHSSSVDTTNMKDLKKIEEH

SEQ ID NO: 81846 - protein, 168 aa, Zea mays
  Coding DNA Sequence Number=SeqID_40067
  Homolog annotation: Hit_ID=Q8H291; Match level="QueryCoverage=79%, HitCoverage=37%, E-value=2e-60, Identity=80%"; Hit description =Putative ATP/GTP binding protein
MEDLWLSAFPIGTEWENIDKIKEFNWSFENLEKALEEGGELHGKTVYLFGSTEPQLLDVNGESKIVLIPIVVAVDCPFPPSDKIGINSVQRENEEIVPMKAMKMAWVPYVPLEDRLSRIDSLKTKIFTLGCTQRRLVCTEASQTHVVTTRYSISMTSLATHEMQGIEC

SEQ ID NO: 81847 - protein, 95 aa, Zea mays
  Coding DNA Sequence Number=SeqID_40068
  Homolog annotation: Hit_ID=Q8H291; Match level="QueryCoverage=79%, HitCoverage=19%, E-value=4e-23, Identity=72%"; Hit description =Putative ATP/GTP binding protein
VDCPFPPSDKIGINSVQRENEEIVPMKAMKMAWVPYVPLEDRLSRIDSLKTKIFTLGCTQWRLVCTEASQTHLVTTRYRWSMTSLATHEMQGIEC

SEQ ID NO: 81848 - protein, 229 aa, Zea mays
  Coding DNA Sequence Number=SeqID_40069
  Homolog annotation: Hit_ID=Q8H291; Match level="QueryCoverage=58%, HitCoverage=36%, E-value=1e-58, Identity=80%"; Hit description =Putative ATP/GTP binding protein
EDLWLSAFPVGTEWENIDKIKEFNWSFENLEKALEEGGELHGKTVYLFGSTEPQLVDVNGESKIVLIPIVVAVDCPFPPSDKIGINSVQRENEEIVPMKAMKMAWVPYVPLEDRLSRIDSLKTKIFTLGCTQWRPDDRKGTYQIEPSRQAMGSGDGAWRGARAPASLRRIEVASSWTCGWEQAGGGGGGWSGGRLAVAECARHEREGRAECGAAGFGRTSGCGRPRWTI

SEQ ID NO: 81849 - protein, 833 aa, Zea mays
  Coding DNA Sequence Number=SeqID_40070
MQRLGYFGGRVARAPGTEKVPEPEGEFKRMIGDEVAQFGSCTFTPKTGKTTMHVVELVPCARNKWGNWNEFWFYVAEGTVEGHEGLPVSEMCSHFYSAYPPFEVAEDDVDEGALRCAAGQSSGRDLVEEFVAYGVWPLAHGWALGEVCPRQMPFRGGKVVRSPAFALNLRNRDPAAFVREAEDEAVRLVGCYVPRTEGQCSWEIRGSNDRLDRVFELNQLPYDGYPGQDDADHRGKKPVVETKDDPAPAAAPSSKKRKLGTAMGGLGVFDGFARELMRTCAAPGERMSSPELRESSARMLKGKKRQKRGSAKAAAPGGGKPPLAAKVAEAAKAARALPSAGKRVADFATDICVEDYLGAPKAKGGALSTGGDVAALAAVRDEAGAASRRLKEVVESLSQVADFANRTASGALTAVVFAEVERLRTQHADAVREKSAVDSKCRKLADKAEAKLARAEGNIARERAEQLQERLIALESRVERAEAAMRAEAERTRTQLVSTYRRTAGTPRCRGGFMSYASLVTCEGAMNALSREGCRHFEVFDQVDEDFDRDVYKVEDLVLKDSAGALYDQMWGPHGREVVRERAETAMAQVTFSFVWRLLDVGVALEPTPETAEDAPDAPTSAAAGEDLPPKVAEGAPDAPAAAAPSAEDPAAVAAETTAEAAAEPMAEASAAPGPSQVQDFGPAHATATTEFLAASTAEGGNEYGGSASEFFDFTDSGSSVEWTEESSEEDLDYFAALDVAAAEASPHAADAQDVPGPSTGRRRRRAVAKRRVSTEERGRLRVSRTGRQELLSLPAAASTGEGELRSLFAGEELRIMLFNYREMGIIPKVEPM

SEQ ID NO: 81850 - protein, 424 aa, Zea mays
  Coding DNA Sequence Number=SeqID_40071
MYVCNRIENDPVEEPEELAGEAPEQQSVGGGKCPLTYLCPIHSLIHLPLYIFIPKVVMRLMVFGYDYGAGYIGLITWVNAKNLAFLLMARLRHTARKSVIPFLPSHLAERPLRRPVAGQSSHLERLHHRLHEEQERRRQEQQGSSFSLHQEIESVRSCSPVLPLEPPPAPPLGVLASGVAAGGDPDDGGGDDSSSHDTDFSANLEPEGWVARPITRDAARGCHFHDALDTLLRRAFDRHTWSVEYRCVVYQHSRRVYPDRWEATCLVRCPENSLQGAEACSEHYSISERDSAEAAMQDAARRALSHYCSVFGGAADGLDLKYYPRRSSGSTGGVIVSPVGEGNPRLSSTVNLAAVLNTELDHALDELSRARAEIALLRAERAERRHLDGGSPAPVGTQHPYRSPQRGHQSYGNPDCKTKITLEP

SEQ ID NO: 81851 - protein, 82 aa, Zea mays
  Coding DNA Sequence Number=SeqID_40072
MAGSAAPCAASLPAGSAAPPPGSAAPCAASPTAENDPVEEPEEFAGEAPEQQSFGGGKCPLTYLCPIHSLIHLPLYTFIPKD

SEQ ID NO: 81852 - protein, 78 aa, Zea mays
  Coding DNA Sequence Number=SeqID_40073
MAGSAASLPAGSAAPPPGSAAPCAASLPAENDPVEEPEEFAGEAPEQQSFGGGKCPLTYLCPIHSLIHLPLYTFIPKD

SEQ ID NO: 81853 - protein, 75 aa, Zea mays
  Coding DNA Sequence Number=SeqID_40074
MAGSAASLPAGSAASLPAGSAASLPAENDPVEEPEEFAGEAPEQQSFGGGKCPLTYLCPIHSLIHLPHYTFIPKD

SEQ ID NO: 81854 - protein, 135 aa, Zea mays
  Coding DNA Sequence Number=SeqID_40075
MTTTFTHAHTENAMLPLHMTLRCFDMAVRLLANKESRGPKGEIINNRKHYMDMRFWRMVGFDKLPKYHQDPTAEELAKTLDCWPSMNYYITGCRYDAKILRRNFVVDLLSYEDNSCRYAIPANIQQRLIDIAKKD

SEQ ID NO: 81855 - protein, 95 aa, Zea mays
  Coding DNA Sequence Number=SeqID_40076
MEALCSKIRIIHPAFAPRIWITNSTKYSIVARVEVKFPIEPSFRDKQHFVLSYINDAKILRSNFVIDLLSYEDNSCRYAIPANIQQRLIDIAKRD

SEQ ID NO: 81856 - protein, 173 aa, Zea mays
  Coding DNA Sequence Number=SeqID_40077
  Subcellular localization annotation: CTP_CleavageSite=25; ConfidenceScore=5.21e-01
MATTNTAPANGGRPSAHRQVLTPVLATGARTGLSQNTNTALAAYDVLCDPPVQPAAQEGPGRGRPAHGATDTRAADGQPRSAPAVGGGTRSSTKAAQAGEPDTRQLTAPRTTNTLLLRTLREGAGRCPRGGGTQLGSPSSPAQMMNILEAEGKGEATARLALPHHEAYDHHPG

SEQ ID NO: 81857 - protein, 58 aa, Zea mays
  Coding DNA Sequence Number=SeqID_40078
MAHVPKTEFRAWAPGNKLRHGGTEGKRHGGARRRGGMAVRPCVSAENEGFAHGARAEN

SEQ ID NO: 81858 - protein, 136 aa, Zea mays
  Coding DNA Sequence Number=SeqID_40079
MATGRHGCSALRLGRKRGVRPWRTCRKPSFGHGPGNKLSPSVWKDTEEKEIEKKRIKQNYTNWAPTSFSAHYSFTPARPSAESGFVWRTDAALIAHRGGAFAVMPLTRVDEQATVETEVQQVEVAEQELIEGKLCP

SEQ ID NO: 81859 - protein, 69 aa, Zea mays
  Coding DNA Sequence Number=SeqID_40080
MAVRPCVWAENEGFAHGAWGEKAQWNGGKTTRRHATTGGRAVRPCVWAENEVFAMAHGPKTEARARTRK

SEQ ID NO: 81860 - protein, 185 aa, Zea mays
  Coding DNA Sequence Number=SeqID_40081
MAIRPCVWAENEGIATAHGPKTEARARPQKIPRSPGRGDAPQVSSAEPRTPSRPSHGRSAPYRAQLQLGDVGCLAGRGSVVTQPRPAMAGYRRPDALDEWLHCGMARCSMRFLFLPRSVDLRSPSSQADPSRLAQRDALDGSTVAATLAHELSWTRDCLEDPRCREADSRRPCPIARAGILCLLR

SEQ ID NO: 81861 - protein, 389 aa, Zea mays
  Coding DNA Sequence Number=SeqID_40082
MALCHCRNNVLMEPAVLNRERVALDKKNKMPVLFDDYSDEDFYGAQRKYSIVARVEVKFPIEPRYRDRQHYILSDINGAKIEAIATRYEIVKYFNSLLHEKHVYKMHNVWFGLNPGAFNFRHLNGTMELYFTHQTVIEPYAVPVQMPPFPKHIFLNLDDIVELPNMTLVENKSVSNQLTIQQYTSNRSITTPIILNIRWDIMPVANHSQTSLAISLEVKVNTQTNHTSSKRSDQNELLAPMVDAKDRKRKRDRERYAVMSVEQKNEKNRKRREARQQNKGHNVMPNVSGGDQNEQLRLYNQTPRRKEGKLEYIRKRRALQASTLNQGSIAMEVPTYTSEVVHPTADVSEPDSSSDNACDWVIPEYTSTPFMPASTQMGMSVHPICLLGH

SEQ ID NO: 81862 - protein, 1554 aa, Zea mays
  Coding DNA Sequence Number=SeqID_40083
  Gene Ontology: Mol. function=helicase activity; Biological process =viral genome replication
  Homolog annotation: Hit_ID=Q1EPC6; Match level="QueryCoverage=90%, HitCoverage=88%, E-value=0.0, Identity=70%"; Hit description=DNA helicase homolog, putative
  Pfam annotation: Domain name=DUF889; Domain location=1238-1457; Score= 383.1; E_value=4.4e-112; Accession=PF05970.5; Description=Eukaryotic protein of unknown function (DUF889)
MEVPTYTSEVVHSTADVSEPDSSSDNACDWVIPEYTSTPFMPASTQTEDVGSPDMSTEPLRRKHHVLPGERQAILARQNKKFEANIARNVATLTEDTISDVGQMDDSTQPGSTIETNNTVDDDDEGVIFGEDNDENEGYLFADEDTNEDFEIDGTQDQSVVTDVPDPYDKVYSNIPEETHMLKHVPDCGYCTAKKFEYEPPGFCCRGGKVELAPLETPPQLRRLWDSADSDARHFRDNIRFFNGHFSFTSLYCCLDSMTTNMRDSGIYTFRAQGMMYHNIKSFGSECGAEHKHLELYFYDDDPSLEHRYRKCREDQIQKDQEVIKQIVGILRGNPYSEHLRSMGHVENLADYHIALNLDQTLNQKTYNTPLTSEVAAVWIEGSERRGQFSKSVMLHGKDRSSHGIRSYHGCYDALSYPLFFPRGELGWHANIPKVGVSMGEVDAYRATHRASNGNDEDAEPPTHLCVSVRDYYCYKFQIRPGVFNPILHGKRLFQQFAVDTYIKIESSRLDFIRKNQDRLRADLYQGLVDSMLDGDVRGEKVGKRTVLSPSFIGGPRDMRRRYMDAMALVRKFGKPDIFLTMTCNPNWDEIRRELLPGQTPQDRPDLVVRVFHAKLQELKHRLTKQDILGKVRAYVYVVEFQKRGLPHAHFLLIMQRKYKLTCPEQYDLLISAEIPSNRYPELRKMVIKHMMHGPCGSLNPNCPCTKGRASCKNQYPRHFHEATMQGKDSYPNYRRRDNGRKEKVRGCELDNRWVVPYNPYLLRLFNCHINVEACGSIKAVKYLFKYIYKGHDRASVVMRDASKENGDVDEIQQYRDARWVTPPEALWRIYGFELSQNSPPVMQLQLHLPNMHMVTFHERQMVERVVNRPGADRSMITSYFEANKLYEEARGILYRDFPEWYTWQQGKVWQRRKRNTGGQVGRIVSALPFEGERFYLRLLLNHVTGATSYVDLRTVDGDTLPTFREAAQRRGLLEADNTIDECLNEAALYQMPSALRRLFATILVFCEPNDVAELWQRHLDTMSEDYHRITQSKSHLQQMVLIDIRNMLQSMGKDIKTFPLPAIIDRYDDSQGIDREIYEEEIIEATAEDVALQETLNEEQKSAYEKILSVVDTSNGGVFFVDGPGGTGKTYLYKALLAVLRSQDKIAVATATSGVAASIMPGGRTAHSRFKIPLTIDDGAICTFTKQSGTSKLLQKASLIIWDEASMAKRQSIEALDNSMRDIMGRPDLPFGGKTIVFGGDFRQVLPVVRKGSRAQIVAASLRSSYLWESMCHLKLVRNMRAKSDPWFAEYLLRVGGGTEEVNNDGDVRLPDEVCVPYTGDDRDLDRLIDDIYPSLNENMSNTSYITSRAILTTRNDWVDMINMRMIDRFQREQMMYHSFDTAVDDPNNYYPSEFLNTLTPNGLPPHVLKLKIGCPVMLLRNIDPANGLCNGTRLVHAGMRVFLPRIPLCPSDDEMFPFHFKRKQFPVRLSFAMTVNKSQGQTIPNVAVYLPEPVFSHGQLYVALSRATTRLNVKVLVIPVTDDKMKKGVEKKSTINGVTYTKNIVYKEVLTP

SEQ ID NO: 81863 - protein, 50 aa, Zea mays
  Coding DNA Sequence Number=SeqID_40084
MAVGVSEALYAKAFYALLYLLCASPLSEYVILDPVSDLVGLCNTLGVTFL

SEQ ID NO: 81864 - protein, 62 aa, Zea mays
  Coding DNA Sequence Number=SeqID_40085
MAVGVSEALYAKAFYALLYLLCASPLSEYVILDPVSDLVGLCNTLGVTFYKTTIMDLSVGYQ

SEQ ID NO: 81865 - protein, 850 aa, Zea mays
  Coding DNA Sequence Number=SeqID_40086
  Homolog annotation: Hit_ID=Q5Z852; Match level="QueryCoverage=25%, HitCoverage=29%, E-value=5e-99, Identity=76%"; Hit description =Putative meiotic serine proteinase
  Pfam annotation: Domain name=PA; Domain location=191-296; Score=24.0; E_value=0.00052; Accession=PF02225.12; Description=PA domain
  Pfam annotation: Domain name=Peptidase_S8; Domain location=17-431; Score=-64.6; E_value=0.0026; Accession=PF00082.12; Description =Subtilase family
  Pfam module annotation: Pfam domain module=PA::Peptidase_S8; Domain location=191-296::17-431
MPAPVPTNVAPAPTPRCNPQAISAPSAEQENPLHRHQRSPEAGGDLFVAAGILSSTQDTHPPQPPPPPDLSPRTGWCRRPLSDPVFRRHNALLLGSRHRCESPFSSPSRFHRRRGPLAGADLSQARHSGAGAVQGLDPAGQGEDDHAGWEQGPAGAEVRAGFEFWFMGFVRYQVSLHELEKAIEQANVRGQIHRLPFDGLALCFCVAIRSLEKAIELLSKRKVQGRILLCGYSFNYISGTASIKKVSHTTRNLGAVGFVVAVENIYPGIKFDPVPVSIPRILITDVSKTEDLIDYYNSSTIIDWAGRATTFKATADFSFQDVDVLKLKPDILAPGNLIWAAWAPNGTDESNYAGEGFAMVSGTSMATPHFAGIAALIKQKNPKWSPSAIKSAMMTTTNTLDKGSRPLRAQQYTTSEMMTLSQATPFDCGSGATLCRMYIINAGQGFKMLWSTIKSFLDPKTASKIHTAPASARRPPANPVALHTVISLRSPPLRPPHPHDLAAPPARIDVRPCPACDALPHSESAAQEPPHLRGDTRSRTRLSRDLVEPSSRPRAKSSPPSDRDRPGTSGLTAEETASWFPDTLDDPLEKDLYMQLWYSTIADAAPQHEDTFPGPTSHPSPLPPPPVGSSGVESSWADDIFSTFCGSNQVPRTSTGIRGKDTTLQSEVPSGAGAHDDTSSSGGYGSNYWGSGLPSDSVHGHKRKGMRRRRLMRRCPCPTRRTLLNLTTRKTIQVDLPELAGHSVVPGPATAPEGMLVVRDERSLVVRLLNPLTRHVVDLPTLLLPGMIAGHVYYFLEDVYPRMTGRLPLKTSSFIKALFADDNVVVAQPPNAGIGAGARFGAIGVDPQAQ

SEQ ID NO: 81866 - protein, 285 aa, Zea mays
  Coding DNA Sequence Number=SeqID_40087
  Gene Ontology: Mol. function=cysteine-type peptidase activity; Biological process=proteolysis
  Homolog annotation: Hit_ID=Q109R5; Match level="QueryCoverage=78%, HitCoverage=22%, E-value=1e-28, Identity=34%"; Hit description=Ulp1 protease family, C-terminal catalytic domain containing protein
MACTQGTSSSLLDTLAHCYTSIVHLDPLLTPIKGRSRALLQGVGRAGKDGTALAVSCGLWMINYMEYWAESSLSDNDDITMFRFKLPTILWDSRLNTKKSHQNLDHNVDEDGESSSDVQIIDTPLTSTNTQELMFVLCTYIMEIDNAKYLKKHWIQSTKPYPISLSLQKLKDILDVNKSMDIDCFNMAVRMTACNDALFLLEDKYHYMDLQFCSITKFDRDPRLRAKPDINMLAKLLECWPAMEYDVSDCKQILLPDSFLGHFTLYVLNMDTRSIYIMDSMHIPS

SEQ ID NO: 81867 - protein, 358 aa, Zea mays
  Coding DNA Sequence Number=SeqID_40088
  Gene Ontology: Mol. function=cysteine-type peptidase activity; Biological process=proteolysis
  Homolog annotation: Hit_ID=Q109R5; Match level="QueryCoverage=76%, HitCoverage=27%, E-value=9e-32, Identity=31%"; Hit description=Ulp1 protease family, C-terminal catalytic domain containing protein
MACTQGTSSSLLDTLAHCYTSIVHLDPLLTPIKGRSRALLQGVGRAGKDGTALAVSCGLWMINYMEYWAESSLSDNDDITMFRFKLPTILWDSRLNTKKSHQNLDHNVDEDGESSSDVQIIDTPLTSTNTQELMFVLCTYIMEIDNAKYLKKHWIQSTKPYPISLSLQKLKDILDVNKSMDIDCFNMAVRMTACNDALFLLEDKYHYMDLQFCSITKFDRDPRLRAKPDINMLAKLLECWPAMEYDVSDCKQILLPDSFLGHFTLYVLNMDTRSIYIMDSMHIPSWFKGDHPSMHNIHNIHYIANNMNVVMELANPTWKDDIYMWRRIVPTWVPRTLNWNLSGFLVINFMHDWNVKVA

SEQ ID NO: 81868 - protein, 78 aa, Zea mays
  Coding DNA Sequence Number=SeqID_40089
MARVTCTNQANGWTVEYCALGSREPVLVLRNLWHTLESLFFSRLYEVFETRTGACGPDNLGGSAIADLKNYNASDILC

SEQ ID NO: 81869 - protein, 101 aa, Zea mays
  Coding DNA Sequence Number=SeqID_40090
MARVACTLRGKRLEGGVLYSRKHGGHHGESNVYQPGQRLEGGVLYSRKHGGHHGESNVYQPGQRLEGGVLYSRKHGGHHGESNVYQPGQWLDGGVLCSRVA

SEQ ID NO: 81870 - protein, 291 aa, Zea mays
  Coding DNA Sequence Number=SeqID_40091
  Gene Ontology: Mol. function=1,3-beta-glucan synthase activity; Cellular component=1,3-beta-glucan synthase complex; Biological process=1,3-beta-glucan biosynthetic process
  Homolog annotation: Hit_ID=Q8H046; Match level="QueryCoverage=94%, HitCoverage=13%, E-value=1e-133, Identity=88%"; Hit description =Putative callose synthase
MARAEANWERLVRAALRGERLGSAYGQPVTGIAGNVPSSLGNNVHIEEVLRAADEIQDEDPTIARILCEHGYTLAQSLDPNSEGRGVLQFKTGLMSVIRQKLAKRGGAAIDRSQDIAKLQEFYKLYREKHKVDELIEDEMKLRESAVFSGNLGELERKTRKRKKVLATLKVLWSVIEDMTKDISPEDANKLISEEMKRVMQKDAARTEDVVPYNIIPLDSLTSTTNAIVNFPEVRAAISTLQYYTDLPRLPGTFSVPDARNSDILDLLQCVFGFQVDITTVIVSQRNRHML

SEQ ID NO: 81871 - protein, 152 aa, Zea mays
  Coding DNA Sequence Number=SeqID_40092
  Homolog annotation: Hit_ID=Q6WGM8; Match level="QueryCoverage=88%, HitCoverage=7%, E-value=5e-60, Identity=87%"; Hit description=Beta 1, 3 glucan synthase
MKLRESAVFSGNLGELERKTRKRKKVLATLKVLWSVIEDMTKDISPEDANKLISEEMKRVMQKDAARTEDVVPYNIIPLDSLTSTTNAIVNFPEVRAAISTLQYYTDLPRLPGTFSVPDARNSDILDLLQCVFGFQVDITTVIVSQRNRHML

SEQ ID NO: 81872 - protein, 153 aa, Zea mays
  Coding DNA Sequence Number=SeqID_40093
MGGRPQGYWGRAATLGCVSNGPNLIHDPLGQNRVTQHHGQKRQEMSRIVAGFTRTTGRRPAWCTVQRTVSGVRRLSSTINLAAVLNTELDHALDELSRARAEIAQLWAEREEHRHLEDGSPAPVETQHPYGSPQRGHHAYGNPECRTKINLEP

SEQ ID NO: 81873 - protein, 162 aa, Zea mays
  Coding DNA Sequence Number=SeqID_40094
  Gene Ontology: Mol. function=kinase activity
  Homolog annotation: Hit_ID=Q6QP54; Match level="QueryCoverage=70%, HitCoverage=40%, E-value=2e-34, Identity=66%"; Hit description =Putative kinase
MGGRPQGYWGRAATLGCVTNGPNLIHDPLGQNRVTQHHGQKRQEMSRGLRAAVVTECAGRHHCLSGGASQMGRRSCFPWPESTRGRAMMVPPVDVAGLRPRLGDVEAPPKPRSSLPSVAEVESEPLVGRGGDRRLRPGLSPGLGVGRSGVRHLLGAEPESEP

SEQ ID NO: 81874 - protein, 109 aa, Zea mays
  Coding DNA Sequence Number=SeqID_40095
  Subcellular localization annotation: CTP_CleavageSite=26; ConfidenceScore=5.06e-01
MSKNTRDTRFIPRFGHTTKVPYFLVEAPTKSRVSFNPNPPFADHKGQAHTIIFTQTSRFLSKDLKWERQEVCEREWEVFLRLEMEFCACSAVGKSVGGVYKGAPKAGGR

SEQ ID NO: 81875 - protein, 116 aa, Zea mays
  Coding DNA Sequence Number=SeqID_40096
MEFCACSTVGKSVGGVYKGAPKAGGRWGNLTEIRLNRFQIRLNRIPPVDFRFTGGLSRRLDRTQIRLNRFQIRLNQIQNSVEPVFQKKLHMTFSNRTDWQTGSDRGEQCRNRLNRF

SEQ ID NO: 81876 - protein, 117 aa, Zea mays
  Coding DNA Sequence Number=SeqID_40097
  Subcellular localization annotation: CTP_CleavageSite=31; ConfidenceScore=5.61e-01
MEFHLLCSPSPAPGLRSSLPQALRVPPSPARAAMLAWAEAALVLTSPSPTTVSSTMSPFGVRPLVAVESGRLFCKVASPLLCLLPFPILCEGVGRERRGPVAAREDEGSGRRLMGRE

SEQ ID NO: 81877 - protein, 157 aa, Zea mays
  Coding DNA Sequence Number=SeqID_40098
MEQANYIFHLKCAPLLRTLTPKRLSAHKYRIGIAVATARTQTADGISPALLAVAGPRPSLFAAPRLRVPPSPARAAMLAWAEAALVLASPSPTTVSSTMSPFGVRPLVAVESGRLFCKVASPLLCLLPFPILCEGVGRERRGPVAAREDEGSGRRLM

SEQ ID NO: 81878 - protein, 101 aa, Zea mays
  Coding DNA Sequence Number=SeqID_40099
  Gene Ontology: Cellular component=integral to membrane
  Homolog annotation: Hit_ID=Q43323; Match level="QueryCoverage=33%, HitCoverage=10%, E-value=8e-16, Identity=100%"; Hit description =Membrane protein
MPMRYLYAPLDSCLFTTAITTSDERYNWPVPWPERLDVSYASLPDDSASNKEKFEADTKYWKQLISEVCDFTGDAFQREERERWLPLVPLPELRANIQVEV

SEQ ID NO: 81879 - protein, 170 aa, Zea mays
  Coding DNA Sequence Number=SeqID_40100
  Homolog annotation: Hit_ID=Q5QLT2; Match level="QueryCoverage=43%, HitCoverage=11%, E-value=4e-19, Identity=50%"; Hit description =Putative early-responsive to dehydration stress protein
METSSAPTAATEAGWRQRRGEATLQKSLPDSTATSGLTPNGDMVEETVVGDGEVSTSAASAHASIAARAGDGGTRRAWGSEERRPGAGDGEQSRYAPLDSCLFTTAITTSDERYNWPVPWPERLDVSYASVPDDSASNKEKFEVDTKYWKQLISEVYFSDFPFNWSSIAM

SEQ ID NO: 81880 - protein, 100 aa, Zea mays
  Coding DNA Sequence Number=SeqID_40101
MEAKSHQQPINLMSTCKNYATSKAEYTNTQLDLPGYNGSSSLISCEKQTIRIEFLSLQVTTLVPTITGMGDLVSGRVRRAICGQVHSGIRTLILIPFSIS

SEQ ID NO: 81881 - protein, 127 aa, Zea mays
  Coding DNA Sequence Number=SeqID_40102
MGKPVPSLLMLLLSRGRVPLDSPTRWQGGRPSYSSNHFLERTCKNYATSKAEYTNTQLDLPGYNGSSSLISCEKQTIRIEFLSLQVTALVPTITGMGDLVSGRVRRASCGQVHSGIRTLILIPFSIS

SEQ ID NO: 81882 - protein, 117 aa, Zea mays
  Coding DNA Sequence Number=SeqID_40103
MEAWASSAMELPRAGKKKLPAADAVDKGALPWGPCSCDGVLLHPREPRGKNGVVAGWPWLEQRDPRPWSREGVAGGCCCREEEEAGKKEGGGWEKWRGGSAKLPPLARRWLLFIERH

SEQ ID NO: 81883 - protein, 109 aa, Zea mays
  Coding DNA Sequence Number=SeqID_40104
MELPRAGKKKLPAADAVDKGALPWGPCSCDGVLLHPREPRGKNGAVAGWPWLEQRDPRPWSREGVAGGCCCREEEEAGKKEGGGWEKWRGGSAKLPPLARRWLLFIERH

SEQ ID NO: 81884 - protein, 379 aa, Zea mays
  Coding DNA Sequence Number=SeqID_40105
  Homolog annotation: Hit_ID=Q6K4U8; Match level="QueryCoverage=27%, HitCoverage=8%, E-value=8e-27, Identity=73%"; Hit description =Putative RNA helicase
MERSRTPVCAIGLPTKRVRSCHVSGPVPEGPRTPQSTFETPNLGWCGAATSTYTYGCCSLLSAPAILFGVGGGLPSTTARRTPRPPPHEHNLNRSVSSATYARTTCTTPRGEDGWKSHGHQHDEAVVVEEGKKKNKSLLRARNPHRVDDKVLAEFITELDRDSTTVPEFDAKLKEKGDDFPDYFVRTLLTIIHAILQPIASNPSSVTVAEGPAGAESAKFPGLARPDDPDHARNLRLELERDADAAPPAPMRDDRDRRWDGRGRDRDYLPLVAPHPCNPVCFEWSGLVTVCLCSYVSRPPAQVFLNVVTCKIQFLYPIYLVGRDPGDGSHTRFQPPPAALRRRGARGGLLTVSVHQHRQPSCIPQFVYWYFGRGRVDIW

SEQ ID NO: 81885 - protein, 186 aa, Zea mays
  Coding DNA Sequence Number=SeqID_40106
MAAYSLSKLVYRARFAIACLQLRLEEIQVTEAILAFGLLQQRYEDEVLEVAQRDHELVMEPAQQPRTLDLAPTGDPRCGLLSQITPHLELHRRLNLSGQGHVPCREIYEALELRNGGSNYFGKGVLKSYGSNLLALKDKIRLLADNLALNLDARLHDLHPASWKLVNGCQMWIAEFLGPRQSGGLR

SEQ ID NO: 81886 - protein, 88 aa, Zea mays
  Coding DNA Sequence Number=SeqID_40107
MPGKANCCYPARMQHSALSLAFAARTAARTCRWFASLERDREREPSGGRVHPGPWLLLQRSLAGPPTFVAPQARGCSYPRGTEPEFRL

SEQ ID NO: 81887 - protein, 90 aa, Zea mays
  Coding DNA Sequence Number=SeqID_40108
MTVLLDSLWPLLRSIFTIDTVVVLQDLRGPVSPNPVVDPILEKGFNLSELMSFDPALVGSTIIDAGDQPSRQNAIFCKLHCIKDLLLTLT

SEQ ID NO: 81888 - protein, 209 aa, Zea mays
  Coding DNA Sequence Number=SeqID_40109
MAEFYWGEGLSRPQICDTKGGSGYFRVPLRKDLFVERPPRKNSATMRVVWDALGQDLGTGVVPWLFLRVEGIGLGTSDGLYEVVISNIRIVRTLGKSYVVKPCLLTLEVFKGPYNPRQKGSQLMGKVAFGATYAQTIDTVVVLQDLRGPVSPNPVVDPILEKGFNLSELMSFDPALVGSTIIDAGDQPSRQNAIFCKLHCIKDLLLTLT

SEQ ID NO: 81889 - protein, 425 aa, Zea mays
  Coding DNA Sequence Number=SeqID_40110
  Homolog annotation: Hit_ID=Q9DUM3; Match level="QueryCoverage=32%, HitCoverage=12%, E-value=4e-07, Identity=26%"; Hit description =Latent nuclear antigen
MDRLFRTPHWGRGGRLPKASEDCWWGRGVRLLGPGRAEARQSSTTTTIGSAATTTTTTFGLAAANSTWGWCPLGVPAAAAATVAAAETVVAPLSGSLEGPGPQGFLPLCSQGRAPTALGCYRRDSAIGPPGSSCGSSCGDANTKWCRSGGGGPYCPDGYQSLNDGDAVEYTIGNGRGGRSCARRRYRGRRGGARLAPTHRPLRRRRRSSASSSPQVLSHAQQALQETKAAILWEWEALEAKHQRLSDWRTQLEEHTKAASRQFVFERSELERDHKDYKKDLQKVFAQELEVTKKEKRLTKKEVHLDQREERVQQGLDDRASSLALAEENLKEKDASLDKRAVDLAWRDKDLAFREKMFERWNKLLADHELEAEEKERALDVAPQVSVSCNVRRFVPNLNAQRKFPISRSCLSLFIRLPHGSSPNS

SEQ ID NO: 81890 - protein, 117 aa, Zea mays
  Coding DNA Sequence Number=SeqID_40111
MGTHPFDFDASSVEAQAHTSYNRRAGYYVQKTAPPLAPVPRLLDCGTGAATRGNPAHGPTVPTKHIGHGDRKGDISKGILLREGSRPRALLLIRGSKAGPSEGFDSRPRALGLQAHY

SEQ ID NO: 81891 - protein, 545 aa, Zea mays
  Coding DNA Sequence Number=SeqID_40112
  Homolog annotation: Hit_ID=Q6KA74; Match level="QueryCoverage=91%, HitCoverage=79%, E-value=0.0, Identity=78%"; Hit description=Ankyrin repeat protein-like
  Pfam annotation: Domain name=Ank; Domain location=67-99; Score=22.0; E_value=0.0021; Accession=PF00023.20; Description=Ankyrin repeat
MDDVSKYAHSPAHLAVLRRDHAALRRLVAALPRLPRAGEVATEEESVAGEAVADAVSAVIDRRDVPRRETPLHLAVRLRDPVAADILMSAGADWSLQNADGWSALQEAVCTREEAIATIIARHYQPLAWAKWCRRLPRILASISRIRDFYMEISFHFESSVIPFIGRIAPSDTYRIWKRGAALRTDMTLAGFDGFRIQRSDQTFLFLGDGARPEDAGGKELHSGSLIVLAHKDKEITDALEGAGVQPTESEVAHEVALMSKTNMYRPGIDVTQAELVPHLNWRRQERTEAVGQWKAKVYDMLNVLVTVKSRRVPGAMTDEELFAMDGEEKNGRGAELDAELDEVLTAEERKQLDSALRMGNNEEESEERGDEGDAGADHTDASGVTKDKKGWFGWGAKKGAKGDDKPSKVGSKDETSDPGKQKEKGSGKKKKGGSSAESVKHESEYKKGLRPVLWLTPDFPLKTDELIPLLDVLANKVKAIRRLRELLTTKLPTGTFPVKQPPIHEQLSTLHTISAAGLTQKKTHRHKVTQLQFIRPGHHKRLHY

SEQ ID NO: 81892 - protein, 320 aa, Zea mays
  Coding DNA Sequence Number=SeqID_40113
  Gene Ontology: Mol. function=hydrolase activity; Cellular component =chloroplast; Biological process=biological_process
  Homolog annotation: Hit_ID=Q8S2H5; Match level="QueryCoverage=78%, HitCoverage=40%, E-value=1e-115, Identity=77%"; Hit description =Putative diphosphonucleotide phosphatase 1
  Pfam annotation: Domain name=Metallophos; Domain location=15-212; Score=20.1; E_value=0.0081; Accession=PF00149.18; Description =Calcineurin-like phosphoesterase
  Subcellular localization annotation: CTP_CleavageSite=34; ConfidenceScore=5.10e-01
MEPDPVAAGASSSPARLALHLIYSSSFFPAGFLLCEKKQVTQLAWCASSPQMTWRLVEWDFFLNLIAPVASRVPYMTAIGNHERDYVESGSVYVTPDLGGECGVAYESYFCMPAISKDKPWYSIEQGSVHFVVMSTEHKWSEMSEQYKWMNQDLSSVNRSRTPWIIFIGHRPMYSSHVGIPVNVDLTFVASVEPLLLKHQVDLVFFGHVHNYERTCVVYKNRCKGKPKKDASGIDTYDNNKYTAPVHATVRAGGFSLDKFPRIVLNKWSLSRVSEFGYARVHATRGDMLVQFVSSSTMEVLDQFRIVKPDPARRLWNKPV

SEQ ID NO: 81893 - protein, 214 aa, Zea mays
  Coding DNA Sequence Number=SeqID_40114
  Gene Ontology: Mol. function=hydrolase activity; Cellular component =chloroplast
  Homolog annotation: Hit_ID=Q8S2H5; Match level="QueryCoverage=84%, HitCoverage=37%, E-value=1e-72, Identity=60%"; Hit description =Putative diphosphonucleotide phosphatase 1
MSGGAPDSPVRQTRGTRCKPNSLSTAIGNHERDYAESGSVYVTPDSGGECGVAYESYFRMPAVSKDKPWYSIEQGSVHFVVMSTEHKWSEMSEQVDLVFFGHVHNYERTCAVYKNRCKGKPKKDASGIDTYDNSKYTAPVHATVRAGGFSLDKFPRIVLNKWSLSRVSEFGYARVHATRGDMLVQFVSSSTMEVLDQFRIVKPDPARRLRNKPV

SEQ ID NO: 81894 - protein, 322 aa, Zea mays
  Coding DNA Sequence Number=SeqID_40115
MKRAPLCEDEVILLSKSLKLDLVTRISCLYSKGGWSLSLFKILKGIKGSHLANKKIKYWIQQRNKVATEGTSGLGAPDCPVYTGQCPVHQRTPTQTCHLREFPEALRYNSLDCPVYTGQCPGAQRKSRLRNSPASGKRSGCSTIIHRTVRCTPDCPVQLRSNGYFAPTTTCSAFNARQKRAEVRLARTGTPDIEQYMSGVHRTSRRAQKSEAPAVESQRPGDVAGAPDMSGVHRTVRFTWSVITLLRLIHPDGDLSHEEVHLNDEVPSNARNIIVLGIRNNESFVFGKRRRSLLNVGDKYVDTYLAALDCKWIQNKVLGMSA

SEQ ID NO: 81895 - protein, 119 aa, Zea mays
  Coding DNA Sequence Number=SeqID_40116
MASTLATRSCEYIERNKKSRKIAMKSHITTKLEAKLGINMSLVLGTRRAISLDHEIVHLNDEVPSNARNIIVLEIRNNESFVFGKRRRSLLIVGDKYVDTYLAALDCKWIQNKVLGMSA

SEQ ID NO: 81896 - protein, 130 aa, Zea mays
  Coding DNA Sequence Number=SeqID_40117
  Subcellular localization annotation: CTP_CleavageSite=72; ConfidenceScore=5.31e-01
MSGAPGGLSLKLSTFGNSQRRLGYNSPDCPVYTGLSGVHRTVSGAPREIGLGNSPASGNANGSSAKIHRTVRFVKVGEAECPCGGSEEVESVELDAAPRVNVDEPAIGVKDVAWHANDPPGAPTVVVFET

SEQ ID NO: 81897 - protein, 212 aa, Zea mays
  Coding DNA Sequence Number=SeqID_40118
  Subcellular localization annotation: CTP_CleavageSite=57; ConfidenceScore=5.30e-01
MSGAPGGLSLKLSTFGNSQRRLGYNSPDCPVYTGLSGVHRTVSGAPREIGLGNSPASGNANGSSAKIHRTVRCAPDCPVCQRSNGHLRATVDSAKCTVEFRVSEQKSEVSPIHPPSRRLSIGIRGTNDDTYQKLKEENERLKMSLTQLKGKCIAQPSQDNRDHMVKKLETGTTVACTTSLEENVKDLRIAKRKKQKMKFNTSSKSLNHAFTK

SEQ ID NO: 81898 - protein, 345 aa, Zea mays
  Coding DNA Sequence Number=SeqID_40119
  Homolog annotation: Hit_ID=Q7F2A7; Match level="QueryCoverage=12%, HitCoverage=16%, E-value=2e-08, Identity=65%"; Hit description =Guanine nucleotide-exchange protein-like
MEGHPRPQSAAGRCSPMVGYQVRQWKADLPFMDLPSALKNSRRHGIPHCLQPLRGVLSRAAGSNPPPFALPAAARSFDGGIPHPRIPPASSDGAPSFDGQPRSGSPRIPHARQLWKGRPSHPARSGSLKSHQQRLPSPLTFQIRLPFRFRCYKASKLPPRYSDFAGVARRCRPFDVRPSSSISSKEEKVGKACRRNDYFSVKVKSVDGFQGAEEDIITISTVRSNGAGGQFSWRGDKAAIEYQDEVLKEASDLQPSTGDAASVDIHNVLDLRAPVIVKVRSSLYAFAKGSCRYLNEGSDGDNAPETSSDVSNESDNDNDNGREPPPVFQYMEHDAPYGRQPLADM

SEQ ID NO: 81899 - protein, 215 aa, Zea mays
  Coding DNA Sequence Number=SeqID_40120
  Homolog annotation: Hit_ID=Q9ZU41; Match level="QueryCoverage=43%, HitCoverage=25%, E-value=2e-13, Identity=45%"; Hit description =Predicted by genscan and genefinder
  Pfam annotation: Domain name=DUF789; Domain location=1-210; Score= -82.4; E_value=6.3e-10; Accession=PF05623.3; Description=Protein of unknown function (DUF789)
MSGSTVAPSATRSWSMAAQLREVAHVFYFIHVRYLNEGSDGDNAPETSSDVSNESDNDNGRSIGRTTQCLAQNICTDQERLSSDDCDSSNQEPPPVFQYMEHDAPYGRQPLADMISVFACKFPDLNTYKSCDLLPSSWISVAWVSHIPDTNRTYATRSRCLLLTFHSLSTTPDDLTHTFLFTFRLRRGVPAPPPSRTGKERKVAVKLSRFQTATA

SEQ ID NO: 81900 - protein, 40 aa, Zea mays
  Coding DNA Sequence Number=SeqID_40121
MAPRIRSKHVMRGLPAPPPSRTGKERKAAVKLSRFQTAAA

SEQ ID NO: 81901 - protein, 113 aa, Zea mays
  Coding DNA Sequence Number=SeqID_40122
  Subcellular localization annotation: CTP_CleavageSite=51; ConfidenceScore=5.30e-01
MIPLLAPPQSPPSSWLRRVAFLLILSLHNQTSKRPSGTTTFSDWEGEEGCREAVEVPNSRRLSSCRIREETVVTGHRHHGGTSPTPVRFDGAYFASLLRNMESSTWTSSCSTP

SEQ ID NO: 81902 - protein, 106 aa, Zea mays
  Coding DNA Sequence Number=SeqID_40123
  Gene Ontology: Mol. function=DNA binding; Cellular component =chromosome; Biological process=chromosome organization and biogenesis (sensu Eukaryota)
  Homolog annotation: Hit_ID=Q2QPG9; Match level="QueryCoverage=57%, HitCoverage=62%, E-value=4e-18, Identity=63%"; Hit description =Probable histone H2AXb
MAENWLCAARINLEEFESFQTPKRRSGDEFHRRRRPRARRRWAPVYLSTVLEYLAAELAVRNDEELSKLLGTVTIAAGGVMPNIHQTLLPKKAGQKGDIGSASQEF

SEQ ID NO: 81903 - protein, 189 aa, Zea mays
  Coding DNA Sequence Number=SeqID_40124
  Homolog annotation: Hit_ID=Q2QPG9; Match level="QueryCoverage=44%, HitCoverage=62%, E-value=1e-21, Identity=68%"; Hit description =Probable histone H2AXb
  Pfam annotation: Domain name=Histone; Domain location=74-146; Score =30.7; E_value=5.2e-06; Accession=PF00125.14; Description=Core histone H2AH2BH3H4
MNAMVTSHIPVCLYSVAGGKVNRQGLPHRTNSHPHSLNGEPQGPRSLITKVPPAPPSNIPLFSYQYRSAARINLEEFESFQTPKRRSGDEFHRRRRPRARRRWAPVYLSTVLEYLVAEVLELAGNAARDNKNRIVMRQIQLAVRNDEELSKLMGTVTIAASGVMPDIHQTLLPKKAGQKGDIGSASQEF

SEQ ID NO: 81904 - protein, 65 aa, Zea mays
  Coding DNA Sequence Number=SeqID_40125
MSSSSLMRRVFPSSKPPDGGPGRTPPPVVTRDGDLRFDGGGSEPGYDLYPSLGLKDFRHPGQDEG

SEQ ID NO: 81905 - protein, 115 aa, Zea mays
  Coding DNA Sequence Number=SeqID_40126
MGSSSLRAEWESRLVGGYEIDDSGYDYDAASPLQPNRILAEYVDVYSPLLYTPNPPHPQVVSIATTAQAKMKPWKETSRSSKTTTSSRCGLAATPSRLPVKAAVIYVSFPHFDLL

SEQ ID NO: 81906 - protein, 111 aa, Zea mays
  Coding DNA Sequence Number=SeqID_40127
MGSSSLRAEWESRLVGGYEIDDSGYDYDAASPLQPNRILAEYVDVYSPLLYTPNPPPQVVSIATTAQAKMKLWKETSRSSKTTTSSRCGLAATPSRLPVKARGYLRFFSAL

SEQ ID NO: 81907 - protein, 115 aa, Zea mays
  Coding DNA Sequence Number=SeqID_40128
MGSSSLRAEWESRLVGGYEIVDSGYDYDAASPLQPNRMLAEYVDVYSPLLYTPNPPHPQVVSIATTAQAKMKLWKETSRSSKITTSSRCGLAATPSRLPVKAAVIYVSFPHFDLL

SEQ ID NO: 81908 - protein, 440 aa, Zea mays
  Coding DNA Sequence Number=SeqID_40129
MGSSSLRAEWESRLVGGYEIDDSGCDYDAASPLQPNRILAEYVDVYSPLLYTPNPPHPQVVSIATTAQEKMKLWKETSRSSKITTSSRCGLAATPSWLPVKAAMARLRHTARKSVIPFLPSRLAERPLRRPVAGQSSHLERLHHRLREEQERRRQEQQGSSFSLHQEIESVRSCSPVLPLEPPPAPPLGAPASGVAAGGDPDDGGGDDSSSHDTDFSANPEPEGWVARPITRDAARGCHFHDALDTLLRRAFDRHTWSVEYRCVVYQHSRGVYPDRWEATCLVRYPENSLQGAEACSEHYSISKQDSAEAAMQDAARRALSHYCSVFGGAADGLDLKYYPRRPSGSTGGVIVSPVGEGNPRLSSTVNLAAVLNTELDHALDELSRARAEIALLRAERAERRHLDGGSPAPVGTQHPYRSPQRGHQSYGNPACKTKITLEP

SEQ ID NO: 81909 - protein, 177 aa, Zea mays
  Coding DNA Sequence Number=SeqID_40130
MTIRARRKKRMPSQRVQYGDTVHLFIDTGHSPYKITFMPFTFDNNSIVVYRGPSDAEGPQQRAEVDLAIKRATDKELELKSLCNYCEKTEASTRSGIEQAHMLFVDAYRELGAQTTPFDRSRAEMMNEEVDDLAGLESSMTRMGGMEEVGVEGHSAPKAGSGEDPAASTSAQVEEMR

SEQ ID NO: 81910 - protein, 150 aa, Zea mays
  Coding DNA Sequence Number=SeqID_40131
MPTLVRGYLFTHCTTEILLNPVFEDLRTPKVPQQRAEVDLAIKRATDKELELKSLCNYCEKTEASTRSGIEQAHMLFVDAYRELGAQTTPFDRSRAEMMNEEVDDLAGLESSMTRMGGMEEVGVEGHSAPKAGSGEDPAASTSAQVEEMR

SEQ ID NO: 81911 - protein, 55 aa, Zea mays
  Coding DNA Sequence Number=SeqID_40132
CYAAAGCDKGRGLGVAGDDGGGGCAAKGAWGGGSFKGKLLGIFLGKALFSSDGLR

SEQ ID NO: 81912 - protein, 96 aa, Zea mays
  Coding DNA Sequence Number=SeqID_40133
MEGGGVADDDGGGGCAAKGAWGGGSVHGGGARVRGARVSGGVNDPDVCGLWFQESLSLCMLIPGFKGKLPDIFLGKGFNNNDFMTFQGSCMGLELW

SEQ ID NO: 81913 - protein, 116 aa, Zea mays
  Coding DNA Sequence Number=SeqID_40134
MGRCRSPVYTVWASKFGPGPPRVRTGPLKWDSDPLYGVWATHSGVPGFLDRTYPGLNQDPGGDLSLVCVALPNLTLCFLCDLNCKGKRLQIVEISRKREKYSKGKDRDIQIDHLIT

SEQ ID NO: 81914 - protein, 64 aa, Zea mays
  Coding DNA Sequence Number=SeqID_40135
MAPYTSHELAPSFDHFRHLHIEDSREKPRSETLAIHLGSEYGSDQPRLEGNRDSWVKMCHLCRV

SEQ ID NO: 81915 - protein, 162 aa, Zea mays
  Coding DNA Sequence Number=SeqID_40136
MQFDHFQHLHIEDSREKPRSETLAIHLGSEYESDQPRLEGNRDSWMVCTLQTTRVNANYAPLPRQIPVYPMVVEEVPMDLPRIRVEHGVILEDSSEELLPTPTPLAESLAFAARSSTSAPPAPAVQAPAPGGDDPDDSGDDDEDDNDDDDDEEHVNKEANYA

SEQ ID NO: 81916 - protein, 230 aa, Zea mays
  Coding DNA Sequence Number=SeqID_40137
  Gene Ontology: Mol. function=structural molecule activity; Cellular component=protein complex; Biological process=microtubule-based movement
  Homolog annotation: Hit_ID=P33628; Match level="QueryCoverage=36%, HitCoverage=75%, E-value=1e-36, Identity=85%"; Hit description =Tubulin alpha chain
  Pfam annotation: Domain name=Tubulin; Domain location=11-184; Score =0.5; E_value=3.9e-08; Accession=PF00091.15; Description=TubulinFtsZ family, GTPase domain
DTSVGVAHDAFNTFFSKTGSGKHVPRAIFIDHEPSVIDEVRTGSYRQLFHLEQLISGKEDAANNFARGHYTVGKEIVDLCLDRVRNSDKQMYSSEGRAPFGNCYCLRVAQQRQTNTQPTIATVFVWRNSDKQMYSSEGRAPFDEEIILLQPPRKDLGDGVGRRWQEKFLLGSLIGSTSFVRFFSSVTNVHAAARPQDEKKKRRAQYSTAVKRKEAEQTERKMAAVARERA

SEQ ID NO: 81917 - protein, 236 aa, Zea mays
  Coding DNA Sequence Number=SeqID_40138
  Homolog annotation: Hit_ID=Q10SC2; Match level="QueryCoverage=69%, HitCoverage=19%, E-value=3e-26, Identity=46%"; Hit description=FHA domain containing protein, expressed
MRDSFLVNGVAFKKTFSYAGFEQQPKKCGWLQFALCLYEHKPLLPEPENNPSYSWFCRDRDSGYLTPLIQNDSTESLLRWQCQPVSHRNYRTTREIQIRRFQGSARKYADYIPVETAPSVNGENESPRSLGDATERDEDGGSVAADALLTLVNSEGQAAGSQNNVEQASSKITDDRRVLSAMIGIVDPKFRKQMSRSGAGNEESMSDAETDEGVEEGDSDSGSDGSDSEEARALCT

SEQ ID NO: 81918 - protein, 170 aa, Zea mays
  Coding DNA Sequence Number=SeqID_40139
  Homolog annotation: Hit_ID=Q10SC2; Match level="QueryCoverage=56%, HitCoverage=11%, E-value=1e-25, Identity=65%"; Hit description=FHA domain containing protein, expressed
MDPWQRRFRAPQRHGWGGIAAAARPLENAYRSSGARYILRKYADYIPVETAPSVNGENESPRSLGDATERDEDGGSVAADALLTLVNSEGQAAGSQNNVEQASSKITDDRRVLSAMIGIVDPKFRKQMSRSGAGNEESMSDAETDEGVEEGDSDSGSDGSDSEEARALCT

SEQ ID NO: 81919 - protein, 103 aa, Zea mays
  Coding DNA Sequence Number=SeqID_40140
VTENKDFIERKREVVSFSPNDKASVDSFLQGEKHFKIPREFLRDISHLESVGFQVRATKNHINVEHFSADIRRGSYCVTSSETDSYESSSAQQFCTIVTLIPK

SEQ ID NO: 81920 - protein, 346 aa, Zea mays
  Coding DNA Sequence Number=SeqID_40141
  Gene Ontology: Cellular component=nucleus
  Homolog annotation: Hit_ID=Q2QXB4; Match level="QueryCoverage=94%, HitCoverage=60%, E-value=2e-61, Identity=69%"; Hit description =Uncharacterised protein family containing protein, expressed
  Pfam annotation: Domain name=Noc2; Domain location=180-345; Score= -120.0; E_value=0.00011; Accession=PF03715.4; Description=Noc2p family
MNQLDSFIDPEFANFLEKWQSELESSRSKGDSDEEGMDSMDDDDDSNDGNLPNAKVLTRKTISEWCQLVSKEPKAPALRNLLNAFRDACRYGVHSDGPLMQRFQSARVFYQIIMFVLSESDNIFRALLEIQDDVNKGKIMNLRNSKKWLTVDSLIKSYLSSSLDLLSQLTDNKILAFVLTRVRVSVVLFSAYPSTSSRLVKKSYERAIISVEQLNAILRQASKTKEKEDLRKIDNWQYISCVNLWVRFLCCHYKDYNLHPLFSQVLQVIRGVAHLFPGTRYLPLRLKLVQMLNELSTCSQMFYPIPSLLFDCLELREVSQKEQTQRTKINFSSLLKVCHFYWKQFG

SEQ ID NO: 81921 - protein, 129 aa, Zea mays
  Coding DNA Sequence Number=SeqID_40142
  Homolog annotation: Hit_ID=Q2QXB4; Match level="QueryCoverage=68%, HitCoverage=19%, E-value=2e-14, Identity=37%"; Hit description =Uncharacterised protein family containing protein, expressed
MAKKLGKKARKFARKNLQVTDDAAATLIHGLEFPEDDAELDADLSDSDGYLSEDPGCPYYSDSEDEKAAKDCIMEEGLDRQNDDMNRDIKKQKKKLKKLLDKVKLLFTKRPGMLILNYQCSYNYRLSAQ

SEQ ID NO: 81922 - protein, 617 aa, Zea mays
  Coding DNA Sequence Number=SeqID_40143
  Gene Ontology: Cellular component=nucleus
  Homolog annotation: Hit_ID=Q2QXB4; Match level="QueryCoverage=77%, HitCoverage=82%, E-value=1e-111, Identity=68%"; Hit description =Uncharacterised protein family containing protein, expressed
  Pfam annotation: Domain name=Noc2; Domain location=293-560; Score =108.5; E_value=2e-29; Accession=PF03715.4; Description=Noc2p family
MKDEVWSPSVNWIRACWKPGTRDWIPTCWIGSLEGSSGLKNSRRAGIYQYLAAGSLPVITDCLIHDMQDPGCPYYSDSEDEKAAKDCIMEEGLDRQNDDMNRDIKKQKKKLKKLLDKDPEFANFLEKWQSELESSRSKGDSDEEGMDSMDDDDDSNDGNLPNAKVLTRKTISEWCQLVSKEPKAPALRNLLNAFRDACRYGVHSDGPLMQRFQSARVFYQIIMFVLSESDNIFRALLEIQDDVNKGKIMNLRNSKKWLTVDSLIKSYLSSSLDLLSQLTDNKILAFVLTRLRVSVVLFSAYPSTSSRLVKKSYERAIISVEQLNAILRQASKTKEKEDLRKIDNWQYISCVNLWVRFLCCHYKDYNLHPLFSQVLQVIRGVAHLFPGTRYLPLRLKLVQMLNELSTCSQMFYPIPSLLFDCLELREVSQKEQTQRTKINFSSLLKVPKNLLKSRDFQEECILSAIQILSAHFAQWSYHVSFPEVATIPLVLLKRLHEQTTVESLRRPIKRLIDQVTENKDFIERKREVVSFSPNDKASVDSFLQGEKHFKIPREFLRDISHLESVGFQVRATKNHINVEHFSADIRRGSYCVTSSETDSYESSSAQQFCTIVTLIPK

SEQ ID NO: 81923 - protein, 91 aa, Zea mays
  Coding DNA Sequence Number=SeqID_40144
MMPSEEIKDYLVAVDAYTQTRSRRKSATGKSVTGADGPRPRAGRSATWREAAVLSGQAQTVHGAGPDGAAEDCRRRLDLAPGRDPVGEERS

SEQ ID NO: 81924 - protein, 78 aa, Zea mays
  Coding DNA Sequence Number=SeqID_40145
MSDDLVVPVHFEVGQELCFRLLDHLLLVLLKLELFVSRQGADGLRHRAGRFATWREAAVLSGQARTVHDLVQELGFPA

SEQ ID NO: 81925 - protein, 101 aa, Zea mays
  Coding DNA Sequence Number=SeqID_40146
MQIIERKCEAQKGAGVRSNLNFYVVLWTVGEKKTLDKLTDQPRNLIPLDIIEVPDLSMSGDNSDLAEDDPCDPTTTSKPEVPMQSLNQLPVVTDLADARLV

SEQ ID NO: 81926 - protein, 170 aa, Zea mays
  Coding DNA Sequence Number=SeqID_40147
MQIIERKCEAQKGAGVRSNLNFYVVLWTVGEKKTLDKLTDQPRNLIPLDIIEVPDLSMSGDNSDLAEDDPCDPTTTSKPEVPMQSLNQLPVVTDLADARLEKTLDKLTDQPGYLIPLDIVEVPDLSVSGDNSDLAEDDPCDPTKTSKPEAPMQSLNQLPFVTDLADVRSV

SEQ ID NO: 81927 - protein, 114 aa, Zea mays
  Coding DNA Sequence Number=SeqID_40148
  Subcellular localization annotation: CTP_CleavageSite=24; ConfidenceScore=5.45e-01
MAAQGAGRAVSSSLAKSLGLRKPKREAGSGAKNRHQTLSRGPGKGDTPKRILPREGTRLRASLLIRGSKAGPPKGSTAASDRVGPTPTTGQRFEGRPPEGFHGRLRLLGLRAHY

SEQ ID NO: 81928 - protein, 249 aa, Zea mays
  Coding DNA Sequence Number=SeqID_40149
  Homolog annotation: Hit_ID=Q6QP51; Match level="QueryCoverage=15%, HitCoverage=17%, E-value=9e-08, Identity=71%"; Hit description =Putative growth-regulating factor 1
  Subcellular localization annotation: CTP_CleavageSite=24; ConfidenceScore=5.36e-01
MAAQGAGRAVFSSLAKSLGLQKPKREAGSGAKNRHQTLSRGPGKGDTPKRILPREGTRLRASLLIRGSKAGPPEGFDSRLRSRGPYTHYWSEVRRPAPRRVPRPPQATRAPRPLLIRGSKAGPRRVHSRLRRRARDDHGYVRYITKARAALPSSPETPCSAPIEGNMALSPLLLAERRRRGVCKKAESVPDRPLALCRGSGAALANPAPAEPLTASTYQPENLGPDRTPGLRPARMREQPDQPKHCARH

SEQ ID NO: 81929 - protein, 151 aa, Zea mays
  Coding DNA Sequence Number=SeqID_40150
  Homolog annotation: Hit_ID=Q6QP51; Match level="QueryCoverage=23%, HitCoverage=16%, E-value=4e-12, Identity=88%"; Hit description =Putative growth-regulating factor 1
MQAACNRTTETHPLNFDASSVEAQAHTSCNRCVGYYVRKTAPPLALIPCLLDCGTGAATRGNLAHGPTVPTEHIGHGAREGDISKGILLREGSGPRALLLIRGSKAGPSEGFDSRAQSTRASGSLLIRGSKAGPSEGFDSRLRALGLRAHY

SEQ ID NO: 81930 - protein, 265 aa, Zea mays
  Coding DNA Sequence Number=SeqID_40151
  Homolog annotation: Hit_ID=Q6QP51; Match level="QueryCoverage=22%, HitCoverage=32%, E-value=6e-11, Identity=58%"; Hit description =Putative growth-regulating factor 1
  Subcellular localization annotation: CTP_CleavageSite=32; ConfidenceScore=5.17e-01
MAQGHISLSSGPRALLLISGSKAGLSEGFDSRAQSTRASGSLLIRGWPPEGFNSRPRKHRARDDSGYVRYMAEARATLPRPLADPYRTGTGVHSDHPVSNSLDTPCSAPSEGNMALFPPPPCGKATKGRMIKVESVLDRPLAPCRGSGAPLANPAPAKPLTTSTNQPEDSEPDHAPGLRSDRMRELKGKCALGPFLSILVIECQHKKKKKRRKLAVYSQQAVSVWGTGLSGGAPDSVRWCTGQCHVRQAISAEEAALGNLLTAYG

SEQ ID NO: 81931 - protein, 257 aa, Zea mays
  Coding DNA Sequence Number=SeqID_40152
  Homolog annotation: Hit_ID=Q2QYT4; Match level="QueryCoverage=69%, HitCoverage=76%, E-value=5e-36, Identity=45%"; Hit description =Expressed protein
MRNLRLPCVQQNHMSYQEDKSVVLRSIQDHISALGDSSSSPGASGSKQSVKTANEKESPKVDPRGIFHGHDNTVEDVQFYPSRDQCNFFKIPQVLHALAHYNARHPGGEFDAVKPLKQSRVGFRGQAWFHINFWARPRSSSSNNKTIKRFFAEVHYKPTSISSPSSSSSSLAITAVPIVEICIIIEEPLSQYRRSCAFCPSYRDILHPKGCRKFVCGNDKDLFEQRLDPCCCTGMGIGKMPFTARPDMSAFLNISPK

SEQ ID NO: 81932 - protein, 168 aa, Zea mays
  Coding DNA Sequence Number=SeqID_40153
  Homolog annotation: Hit_ID=Q8L8G4; Match level="QueryCoverage=38%, HitCoverage=14%, E-value=9e-15, Identity=64%"; Hit description =Nucleosome/chromatin assembly factor group C
MAHRTVRCTRDMSGAPPRHHCRWILTVEASDLWARLDVRCTPDKYCLLSGVPVWARLTSARAVRAFNAPQKAGGEGLMSSVTMQCLRIASVKAADITSKIKKAILTGHKENEEFALAMCPAEPYVLSGGKDKSVVLWSIQDHISALGDSSSSPGASGSKQSVKTANEK

SEQ ID NO: 81933 - protein, 233 aa, Zea mays
  Coding DNA Sequence Number=SeqID_40154
  Gene Ontology: Mol. function=protein serine/threonine kinase activity; Cellular component=cell surface; Biological process =protein amino acid phosphorylation
  Homolog annotation: Hit_ID=Q5W239; Match level="QueryCoverage=99%, HitCoverage=43%, E-value=1e-128, Identity=87%"; Hit description =Ser/Thr receptor-like kinase precursor
  Pfam annotation: Domain name=Pkinase; Domain location=1-218; Score =43.4; E_value=3.8e-11; Accession=PF00069.15; Description=Protein kinase domain
  Pfam annotation: Domain name=Pkinase_Tyr; Domain location=1-218; Score=5.4; E_value=8.4e-13; Accession=PF07714.7; Description=Protein tyrosine kinase
  Pfam module annotation: Pfam domain module=Pkinase::Pkinase_Tyr; Domain location=1-218::1-218
QLPNGVPVAVKMLENSTGEGEDFINEVATIGQIHHANIVRLLGFCSEGTRRIARGMEYLHQGCNQRILHFDIKPHNILLDYSFNPKISDFGLAKLCARDQSIVTLTAARGTMGYIAPEIYSPNFGGVSYKSDVYSFGMLVLEMVSGRRNSDPGIENQNGVYLPEWVYERVVTGQDLTLSKKIADQEKETVRQLAIVALWCIQWNPKNRPSMTKVVNMLTGRLQNLPIPPKPYA

SEQ ID NO: 81934 - protein, 384 aa, Zea mays
  Coding DNA Sequence Number=SeqID_40155
  Gene Ontology: Mol. function=protein serine/threonine kinase activity; Cellular component=cell surface; Biological process =protein amino acid phosphorylation
  Homolog annotation: Hit_ID=Q5W239; Match level="QueryCoverage=90%, HitCoverage=57%, E-value=0.0, Identity=95%"; Hit description=Ser/Thr receptor-like kinase precursor
  Pfam annotation: Domain name=Pkinase; Domain location=100-369; Score =165.0; E_value=2e-46; Accession=PF00069.15; Description=Protein kinase domain
  Pfam annotation: Domain name=Pkinase_Tyr; Domain location=101-369; Score=119.6; E_value=8.6e-33; Accession=PF07714.7; Description =Protein tyrosine kinase
  Pfam module annotation: Pfam domain module=Pkinase::Pkinase_Tyr; Domain location=100-369::101-369
MYDFNTSLMRAWKVEGCFPSPLLHEGWYGNSVTLSGSHVILIAATTSVATFVVLVVTALYLSLKKRYNEAIHLKVEMFLKTYGTSKPTRYTFSEVKKIARRFKEKVGQGGFGTVYKGQLPNGVPVAVKMLENSTGEGEDFINEVATIGQIHHANIVRLLGFCSEGTRRALIYEFMPNESLGRYIFLPQELLVPEKMLDIATGIARGMEYLHQGCNQRILHFDIKPHNILLDYSFNPKISDFGLAKLCARDQSIVTLTAARGTMGYIAPEIYSPNFGGVSYKSDVYSFGMLVLEMVSGRRNSDPGIENQNGVYLPEWVYERVVTGQDLTLSKKIADQEKETVRQLAIVALWCIQWNPKNRPSMTKVVNMLTGRLQNLPIPPKPYA

SEQ ID NO: 81935 - protein, 164 aa, Zea mays
  Coding DNA Sequence Number=SeqID_40156
MSSLGVRLHISPATQNIRLRIQDPLEPSLGTGHGTTPYFVDSPHVCYTNDLTNPHQMDSADSIADKAIGRMQEISDKIFSVARETIRPGRGLTSFDATKLRVALEEIACMLEQDSLVLQEHLDIVNNFNIPVDSSYEPSTLSSPPPSDDDLTPHWDFAEHFQNF

SEQ ID NO: 81936 - protein, 296 aa, Zea mays
  Coding DNA Sequence Number=SeqID_40157
MRGGRLRRRLCRVWLLPDGVEARVFVSLGVCAYIAEKDDMVPVWLRFWAASGRQKQKPRPNAQILGSFSRPRFAQKPRASHETKSRAKQASSGSRGLAIGFPPRPRLRGLSPRKDRHRRRRRSGSGGHDHTPICSSAAFLLRSRTKQEYPSDFRINSGYSSEVPRSTSAKMDSADSIADKAIGRMQEISDKIFSVARETIRPGRGLTSFDATKLRVALEEIACMLEQDSLVLQEHLDIVNNFNIPVDSSYEPSTLSSPPPSDDDLTPHWDFAEHFQNFWGVEYDSDQMPSFNDNDV

SEQ ID NO: 81937 - protein, 126 aa, Zea mays
  Coding DNA Sequence Number=SeqID_40158
MDSADSIADKAIGRMQEISDKIFSVARETIRPGRGLTSFDATKLRVALEEIACMLEQDSLVLQEHLDIVNNFNIPVDSSYEPSTLSSPPPSDDVLTPHWDFAEHFQNFWGVEYDSDHMPSFSDNDV

SEQ ID NO: 81938 - protein, 182 aa, Zea mays
  Coding DNA Sequence Number=SeqID_40159
MSSLGVRLHISPATRIIRLRIQDPLEPSLGTGHGSTPFFVDSPHVCYTNDLTNPHQMDSADSIADKAIGRMQEISDKIFSVARETIRPGRGLTSFDATKLRVALEEIACMLEQDSLVLQEHLDIVNNFNIPVDSSYEPSTLSSPPPSDDDLTPHWDFAKHFQNFWGVEYDSDQMPSFSDNDV

SEQ ID NO: 81939 - protein, 121 aa, Zea mays
  Coding DNA Sequence Number=SeqID_40160
MAVNVGVSCDESTIVAEAKASRKLGEKRGCAGGSSGGLIVALTSEEERAAARAAASEVPPAPQRKVAIAKRLRRPPSSSKNTVFDVAMESENEKLRKALATLLRVVQKRSCDIVDVVNAAF

SEQ ID NO: 81940 - protein, 131 aa, Zea mays
  Coding DNA Sequence Number=SeqID_40161
MESENEKHRKALATLLRVVQKRSCDIVDVVNSAFQPFNSPLVDELNRALVEIDDLAKDLEDVAVQTQWEVENMANCQVNKHPRQEEAVEELLIEDGSEDKLLIDEESPINYEDLVGYDDGRDYSTDDTYPY

SEQ ID NO: 81941 - protein, 127 aa, Zea mays
  Coding DNA Sequence Number=SeqID_40162
MTPCGANRTTKITLDSREDFMVDLSSELVEKDLQVQQLSQHITTLEEQVEIRDNTIDILEIQLHDVQEELEEANDHLEMHHQDMEANEAGSEGEEDPEELEPPPGPNVTPSGMPPSPASSVASTTQG

SEQ ID NO: 81942 - protein, 126 aa, Zea mays
  Coding DNA Sequence Number=SeqID_40163
MARVACTLRGKRLDGGVSMLSVGVNPGCPRFRADDTTEAATLKALTTFCGYHPLEMMMHPLGLFHVEKMDDPMITVQCMSALYRLQALQSDAIAHLTDLAQTTEITLDSREDFVVDLSSKLVEKDL

SEQ ID NO: 81943 - protein, 374 aa, Zea mays
  Coding DNA Sequence Number=SeqID_40164
MEECLLPRGGYMLRVRRFGFFRFGSAAFPHQWSSRMMTTSLVVGRSKLGCGLCLALSFKDLHHPCWGGGRGESGPASAWDGDPLLPPAFGGEGHPPSVRRRRPPAMRGKANCCCRDRVQLSVLHLGDGRARGWHASSAGSGAASDVAACRLVRVWLSVHRTCDCRAARRSGITTPPCGGRCRPVWEDLSGDLPVQAGAATIRRRGAGAHVAAVVGAEVVVARGGFSTDETIDATCGRTSGSLALMACPRPSCWDVGEGLFTAAFALRSSLLLFSRPTRRSLSLLVQWSPTSHLEFVVPQALCRSAMSWSRRQRCWRGQRRSRLEKEASSAQEQLASQAEEVQQRRLELGQVIRERDQPRSHAAEAVSRAEVLRG

SEQ ID NO: 81944 - protein, 391 aa, Zea mays
  Coding DNA Sequence Number=SeqID_40165
MEECLLPRGGYMLRVRRFGFFRFGSAAFPHQWSSRMMTTSLVVGRSKLGCGLCLALSFKDLHHPCWGGGRGESGPASAWDGDPLLPPAFGGEGHPPSVRRRRPPAMRGKANCCCRDRVQLSVLHLGDGRARGWHASSAGSGAASDVAACRLVRVWLSVHRTCDCRAARRSGITTPPCGGRCRPVWEDLSGDLPVQAGAATIRRRGAGAHVAAVVGAEVVVARGGFSTDETIDATCGRTSGSLALMACPRPSCWDVGEGLFTAAFALRSSLLLFSRPTRRSLSLLVQWSPTSHLEFVVPQALWCGGCSYPREWNRSPNLQPLCDELEPEAAVLAWTEAESARKEASSAQEQLASQAEEVQQRRLELGQVIRERDQPRSHAAEAVSRAEVLRG

SEQ ID NO: 81945 - protein, 205 aa, Zea mays
  Coding DNA Sequence Number=SeqID_40166
MTTQGGLQPTSNEANMCTNDNGSQLGTRIVDEIMAGKNVFFDLPHKLTGEIWTLKFHCIGAQPGKEIVTVNIDKAYVAFYNVRTNVDEETIEVSIDAYKEWLAILQHDNPEMDLMDDFREDTIKTYKEWLRHQGDLPDILLYERQSNDDLILSDEEIHGSSKPTANWPSHARRHRKRDPDNDGVFKKEGCGTLKGIAAATKRIKN

SEQ ID NO: 81946 - protein, 205 aa, Zea mays
  Coding DNA Sequence Number=SeqID_40167
MTTQGGLQPTSNEANMCTNDNGSQLGTRIVDEIMAGKNVFFDLPDKLTGEIWTLKFHCIGAQPGKEIVTVNIDKAYVAFYNMRKNVDEETIEVSIDAYKEWLAILQHDNPETDLMDDFREDTIKTYKEWLRHQGDLPDILLYERQSNDDLILSDEEIHGSSKPTANWPSHARRHRKRDPDNDGVFKKEGRGTLKGIAAATKRIKN

SEQ ID NO: 81947 - protein, 97 aa, Zea mays
  Coding DNA Sequence Number=SeqID_40168
MGARLLLVVCPPEAACARARRCWTRRSSAASTPGKSLPDGARVPSEKPIKAGPEVLSDLHYKKVGFYKKLLPESSPLVGFWLLGGQKPKPKVKPNTP

SEQ ID NO: 81948 - protein, 52 aa, Zea mays
  Coding DNA Sequence Number=SeqID_40169
MEVGQHAPEVEAAEASDEDVEAYIGKATVPSEKPLKAGPEVLSDLHYEKVGF

SEQ ID NO: 81949 - protein, 193 aa, Zea mays
  Coding DNA Sequence Number=SeqID_40170
  Homolog annotation: Hit_ID=Q9LZF6; Match level="QueryCoverage=30%, HitCoverage=5%, E-value=3e-07, Identity=49%"; Hit description=Cell division control protein 48 homolog E
MEQISQKFASVRANMQSERTLRRVEKNLKLLNQQSMMCKMKLGIMTMRILKIVNTMMRKWILTRNMRDSTSYGSLLAKHGTVCSSDLRMASFVIQSKNYVMRTKHLKLEYIDRLRRFDGYNVMSRAMEVGQHAPEVEAAEASDEDVDAYIGKATGVVLIYLLLFLNNIYRNCPTPVYYTKMFSVLQHNQCFYD

SEQ ID NO: 81950 - protein, 83 aa, Zea mays
  Coding DNA Sequence Number=SeqID_40171
MEQISQKFASVRANMQSKRTLRRVEKNLKLLNQQSMMCKMKLGIMAMRILKLVNTLMRKWILTRNMREQKLCDENKAAEVGIY

SEQ ID NO: 81951 - protein, 448 aa, Zea mays
  Coding DNA Sequence Number=SeqID_40172
  Homolog annotation: Hit_ID=Q9LZF6; Match level="QueryCoverage=27%, HitCoverage=49%, E-value=4e-62, Identity=73%"; Hit description=Cell division control protein 48 homolog E
MAASGYSGSAPITDQGFEGWPPKEGQRHLRHSDCSATRQSESDRQSGLAKGATTNSAPPDPRARTRAKTRKTANSAPPDPRARTRAKTRKTANSAPPDPRARTRAKTRKTTNPAPPDPRARTPPWPRPNDLRLARPLGSGSATATEGKTQPRLRRKPHVALPRAQTATSTGNVIIILPRIDSGQRQQGLDRSNSCPSIRLRRTSDSHDITPAGCPDLSGCHIGMAFSEKVGRAGPRTGQALSWGRSLPSPAWTLVTPLLQAHPTWARDEHEGRGTSTSLTLGSGRLASPPSALAHALDPSGLGHAAHSLVGLGTPLSRNADTWPVRKGDLFLVMGGMRSVEFKVIETDPYEYCIVAPDTEIFCDGEPIKREDEERLDEVGYYDVGGVRKQMTQIRELVELPLRHPQLFKSIGVKPPKGILLYGPPGSGKTLIARAVANETGAFFFLIN

SEQ ID NO: 81952 - protein, 179 aa, Zea mays
  Coding DNA Sequence Number=SeqID_40173
MAEECQPPWGCTPLTTRRRQDRRHHRERELFGDEIARGDGPDADPSREHRRTPSGGPKGPSRKSEKLSFSEPLQRLEAPTCGPTVTLSTMVTGQSAVGIGVADGIGGPAVIAPTGAQEQQANQTLAPPIGSHPPLRQARGPLLVPRIRGTLFYSMKTLHPYDASRSHGEWHLTPPHGQA

SEQ ID NO: 81953 - protein, 118 aa, Zea mays
  Coding DNA Sequence Number=SeqID_40174
  Subcellular localization annotation: CTP_CleavageSite=30; ConfidenceScore=5.09e-01
MAPNPTTWADPRVPRGKERKSIPCIQRWVRTSTGGCRTPMRTSPEPPKKARRAPWEDPSPPPSEVRALARSRDKDPGMSKGPAAHRAHHPFYKKLPLHAEDMEISGVRAPEDRLSGKH

SEQ ID NO: 81954 - protein, 269 aa, Zea mays
  Coding DNA Sequence Number=SeqID_40175
MKTLHPYDASRSHEEWHLTPPRGSQVPPSEVRTLARSRDEEDPGTGKGPVLTHVQVMPYAPRSEDAPPATTLTGGTPSQHLMCPVQSTDRRRQGHPADGAPDQSVGEQCARAERRTVLIIPSTRSFPCTPRIWRSRVSGHKIAPAANICGSKRYVLYVPGPTCRGPIPLCMPPFSYKRGGMRRYTQAQSFRPNLSLTSSYKLSSRYLLVYLLVCMFACSCCIVIGAFVPSRGGQICKSTPGSGARSQFRELSFPLRRISTTSSLDPFDA

SEQ ID NO: 81955 - protein, 52 aa, Zea mays
  Coding DNA Sequence Number=SeqID_40176
MLEEVARWDDLVTGLRPVTYGAKGSGARSQFRELPFPLRRISTASSLDPFDA

SEQ ID NO: 81956 - protein, 87 aa, Zea mays
  Coding DNA Sequence Number=SeqID_40177
MAPKPLGFYTKNVQYHLGHPLEKVELETRTFDMPWHGFCRDCNLADGEYILVPEQGAAQEVAPDPAPEPAPEDLPATALEGKPRFYA

SEQ ID NO: 81957 - protein, 87 aa, Zea mays; identical to SEQ ID NO: 81956
  Coding DNA Sequence Number=SeqID_40178

SEQ ID NO: 81958 - protein, 80 aa, Zea mays
  Coding DNA Sequence Number=SeqID_40179
MEKLNFQNQCSDSRHPAHGPTKPLSAEITGSYPPLRRDQGPLSPHEEQLPTPPRGRLNGHHVARKDDTSQGASVGPDLRE

SEQ ID NO: 81959 - protein, 192 aa, Zea mays
  Coding DNA Sequence Number=SeqID_40180
  Subcellular localization annotation: CTP_CleavageSite=29; ConfidenceScore=5.37e-01
MAHQRRRLPQLRAARQQRQPPLQRVASPVAATTSTPGSLPTGGDHLSMRAMAKRSSPPFPYGGEDKTIQAMELGAPVEERRSHMAAHLQQRKNKTGSTGPLGRTKGTNSLAASSSGWMMPVQILPPSADAFHPSRRLPCSHLEVSREASPDAHREKSHRHSCQYHASSGPPQKAEKLNLQNQCSDSRHPAHG

SEQ ID NO: 81960 - protein, 146 aa, Zea mays
  Coding DNA Sequence Number=SeqID_40181
MANSVRMQTVQQRASRRRTVQGIASTKWLAGFARGPWSDGATALDFGELNCVGDDVTICNYYVVTGSDDAEDDRGDPRRRRRRGDAARCWTSGMMRSTAINGKIMGATEQSSRAARLAPGAAGEKAVCVAAGQGRAWAARVLLEAL

SEQ ID NO: 81961 - protein, 147 aa, Zea mays
  Coding DNA Sequence Number=SeqID_40182
MANSVRMQTVQQRASRRRTVQGIASTKWLAGFARGPWSDGATALDFGELNCVGDDVTICNYYVVTGSDDAEDDRGDPRRRSVPTEPKENYGMLILVSSPPNDMMSPNITGAQGGPKLPAQEADLPPPIILQSKNLEQKSTTLPKGSV

SEQ ID NO: 81962 - protein, 311 aa, Zea mays
  Coding DNA Sequence Number=SeqID_40183
  Gene Ontology: Cellular component=cytoplasm
  Homolog annotation: Hit_ID=Q2QMH2; Match level="QueryCoverage=65%, HitCoverage=24%, E-value=2e-91, Identity=79%"; Hit description=Root hair defective 3 GTP-binding protein containing protein, expressed
FTTVFSHDKDSIPRVWTGKEDVRAIAKEARSAALKLLSVMAAIRWDDEPDRIESILTSTLLEGSVVSKIASAASADPLASTTWEEIAPKHTMITPSQCKSLWKQFKAETEFTITQAVSTQQAHRRGNSKLPPPWAIVAIAILGFNEIMVLIRNPIYLFLLFVGYLMVKALAMQLDVSREFQNGVVPGIISVSVKLLPAIQNLVNKVAAEQQAEHQQQHPHPHPHTQAPGPPQPQMQPPPLLLSPRSPMSELRRLHMPRSPRSPRKVASPAPSSSSSSSAVSSPRHVGEDQKPRPGAVGAPENEATVADSIV

SEQ ID NO: 81963 - protein, 272 aa, Zea mays
  Coding DNA Sequence Number=SeqID_40184
  Gene Ontology: Cellular component=cytoplasm
  Homolog annotation: Hit_ID=Q2QMH2; Match level="QueryCoverage=61%, HitCoverage=19%, E-value=2e-69, Identity=75%"; Hit description=Root hair defective 3 GTP-binding protein containing protein, expressed
MAAIRWDDEPDRIESILTSTLLEGSVVSKIASAASADPLASTTWEEIAPKHTMITPSQCKSLWKQFKAETEFTITQAVSTQQAHRRGNSKLPPPWAIVAIAILGFNEIMVLIRNPIYLFLLFVGYLMVKALAMQLDVSREFQNGVVPGIISVSVKLLPAIQNLVNKVAAEQQAEHQQQHPHPHPHTQAPGPPQPQMQPPPLLLSPRSPMSELRRLHMPRSPRSPRKVASPAPSSSSSSSAVSSPRHVGEDQKPRPGAVGAPENEATVADSIV

SEQ ID NO: 81964 - protein, 293 aa, Zea mays
  Coding DNA Sequence Number=SeqID_40185
  Gene Ontology: Mol. function=cysteine-type peptidase activity; Biological process=proteolysis
  Homolog annotation: Hit_ID=Q53MK8; Match level="QueryCoverage=61%, HitCoverage=20%, E-value=2e-11, Identity=28%"; Hit description=Ulp1 protease family, C-terminal catalytic domain, putative
  Subcellular localization annotation: CTP_CleavageSite=42; ConfidenceScore=5.09e-01
MTAMRSTLMIGQHDLKKRCSNPAELLQSPSIGARFKSKCFPRSSRSPDPRASAFLIDPLYRSSFIDLDKGCGSAPIHISLSFPFRKNSAKKIKVPSPQAPSVKSSPKFEINVKSKQKTPRKSQKLNICCIPYDVIVSTWIMSDQQRDAVARLGFSSIFDLRTDALESRSLIRWLMDKLDPHDMTIRPRGWQGTEDNKRDGGREFTDWYGEVDAAAKLRRDLKVGKEEFDVVKLQDKIVLGNDDELSIRCFFLILFNRLLFPSASWGITNNEIYYLDHLHHPASPDNKYGYSPH

SEQ ID NO: 81965 - protein, 77 aa, Zea mays
  Coding DNA Sequence Number=SeqID_40186
MYFKLDYLEFLGKALALESGSNARRLKELSWIGAAEIAWQVASDARKDAAAAGVSFLSARAFENQFLSVKLIRTDSV

SEQ ID NO: 81966 - protein, 403 aa, Zea mays
  Coding DNA Sequence Number=SeqID_40187
  Gene Ontology: Mol. function=cysteine-type peptidase activity; Biological process=proteolysis
MTIRPGVGKELKITKETVRLILGLPSVRGDRDFTDWYGEIDAASKLRRDLNICNEEFDVVKLQDKLVIGNDDELSIRCFSGFIQSPSIPVCFMGRWHKRNRTNINATVYGCSLIILFHSRTETCYVIAPERPISEVFNIYVPRIKHLIGNKLKCLPSQHRPMFESMFDAHDKDVDKYCASLQQSHQMLVSKQIELSETFGEMIDEVLRAATQRDTQQEDNSPTTSSPPTNDHVSTPVQTPDHQHHDQPTHVPTDDNKISEQAFTIPCFCRRARLPSPSALHPPPSALASLRASYNRVLLPSMVRIPRDYHLPPPSRAPSATIRASYSRALLRRRGSRTLESRQQIPQSSSGDRNRGGLRGRYYDEGEGERSGAAAPFIIIGRAPGGNGCRADEIEERAGGCRP

SEQ ID NO: 81967 - protein, 324 aa, Zea mays
  Coding DNA Sequence Number=SeqID_40188
  Gene Ontology: Mol. function=cysteine-type peptidase activity; Biological process=proteolysis
MYGTPCIKYFDNETIRDLARGDRRGPCQTGEPFGHAEFHSRTETCYVIAPERPISEVFNIYVPRIKHLIGNKLKCLPSQHRPMFESMFDAHDKDVDKYCASLQQSHQMLVSKQIELSETFGEMIDEVLRAATQRDTQQEDNSPTTSSPPTNDHVSTPVQTPDHQHHDQPTHVPTDDNKISEQAFTIPWFCRRARLPSPSALHPPPSALASLRASYNRVLLPSMVRIPRDYHLPPPSRAPSATIRASYSRALLRRRGSRTLESRQQIPQSSSGDRNRGGLRGRYYDEGEGERSGAAAPFIIIGRAPGGNGCRADEIEERAGGCRP

SEQ ID NO: 81968 - protein, 83 aa, Zea mays
  Coding DNA Sequence Number=SeqID_40189
  Subcellular localization annotation: CTP_CleavageSite=56; ConfidenceScore=5.38e-01
MARQPAQRGGSRPVAMRLMVLVMTMVLVLSIATTAQAKMKLWKETSRSSKTTTSSRCGLAATPSRLSVKAAVIYVSFPHFDLL

SEQ ID NO: 81969 - protein, 99 aa, Zea mays
  Coding DNA Sequence Number=SeqID_40190
MYACNRIENNPVEEPEEPAGEASEQQSVGGGKCPLTYLCPIHPGCSSLRRRAVNGARCGNETDGFGYDYGTGCQHCNHCSGEDEAVEGDFQEFQDYDEF

SEQ ID NO: 81970 - protein, 90 aa, Zea mays
  Coding DNA Sequence Number=SeqID_40191
MQKPTHHLLKLLKDSEVRAAVSVGSGGGLSSPSPIEVVRDVDDVFGNCCGTSSSSIVRTIYIHAMERKQALEVMGVGSAMRRHQPPARRS

SEQ ID NO: 81971 - protein, 330 aa, Zea mays
  Coding DNA Sequence Number=SeqID_40192
  Homolog annotation: Hit_ID=Q2EN88; Match level="QueryCoverage=13%, HitCoverage=18%, E-value=3e-11, Identity=75%"; Hit description =Guanylyl cyclase-like protein
MSGVNILQLFAYDISCSFELSSALLFSFIACETFTCEIDIIMRTLVEDVEVVICLMLRKTGPLMNYVQQPLPPLPRPRPDAAPLLRPRPIAAERPHRRAPEPASRRHPHTTCPLSPSGRDDIGLEKGPETDGPHDRGGRGATAVPEDIVDVPHHFDWRWRRQPPTTAHANGGADLTVFEQFEQMERKAEIHNGAIEDGPPFNLFADLGQPNDVVLGAATSIWLPVPATMSSPLATTRMRASRSISAYGIGFLLLSGHCIAIALVDKFKLKSDHDVQQHNEESDYMGRTEFPVDEDAHSVGDCVKESITDDSDHNVCLSRPELCYYEEPKG

SEQ ID NO: 81972 - protein, 117 aa, Zea mays
  Coding DNA Sequence Number=SeqID_40193
  Subcellular localization annotation: CTP_CleavageSite=24; ConfidenceScore=5.38e-01
MDAQPSPCSSLLGQQPRPWRPEPMCSAPFSTPWGRNSMAAELHSSKQQLPPMDSVPPLRSRSKLPLPSSSMGAGTPFFPLAELDHASPSAPAMAQGPSLVRARAGEPPSPMANALLR

SEQ ID NO: 81973 - protein, 114 aa, Zea mays
  Coding DNA Sequence Number=SeqID_40194
MASRAHVLGALLHPLVGLLCTAAPSLCFLALLWFELELVSHRRPWPTPCSAPCSNSTPRAPPVRRNAESGHRASSATVGSATPTDSHNSPFVAGAPPCHATVPVVLLRLRFGLP

SEQ ID NO: 81974 - protein, 160 aa, Zea mays
  Coding DNA Sequence Number=SeqID_40195
  Homolog annotation: Hit_ID=Q6QP51; Match level="QueryCoverage=32%, HitCoverage=24%, E-value=4e-15, Identity=77%"; Hit description =Putative growth-regulating factor 1
MKHGNSDDGHTATSPVTRRNDGHLVSHRRTEVVEAEGMRASDTFGRRSGRRFTSVMMIASKKVAPSGVQQPPQSTRDPSPLLIRGSKAGPSKGFHSLPRAGRVRDDPRYVRYMAEARATLLRYPRTFLRPAGTICNGIPPEGGAEPLDPIEWVRVQQITR

SEQ ID NO: 81975 - protein, 117 aa, Zea mays
  Coding DNA Sequence Number=SeqID_40196
  Homolog annotation: Hit_ID=Q6QP51; Match level="QueryCoverage=43%, HitCoverage=28%, E-value=1e-11, Identity=75%"; Hit description =Putative growth-regulating factor 1
MEQTIGNKGLQILHNSGGERPWVARRNDGHLVSHRRTEVVEAEGMRDWERGYSEKDPSQRRKLAPSPPTDQGFEGCALWGSETAPEHSGSEPITDQGFEGWPLGRVRQPPQSMQSQG

SEQ ID NO: 81976 - protein, 173 aa, Zea mays
  Coding DNA Sequence Number=SeqID_40197
  Gene Ontology: Mol. function=DNA-directed DNA polymerase activity; Biological process=nucleobase, nucleoside, nucleotide and nucleic acid metabolic process
  Homolog annotation: Hit_ID=Q6K777; Match level="QueryCoverage=79%, HitCoverage=6%, E-value=3e-57, Identity=77%"; Hit description =Putative DNA polymerase epsilon catalytic subunit protein isoform b
MTALPEIGFQCDNNQGECRAKFSCHLDCFAWVKRDSYLPQGSQGLKAVTKAKLRYDPLEVNPEDMVRFAMEQPQTMASYSVSDDVATYYLYMTYVHPFIFSLATIIPMLPDEPALLTKSASSSACPIVIQILIWDVEVQPNRHAVLGASESRPDLIYGFNEMLVLAHLLSDDR

SEQ ID NO: 81977 - protein, 121 aa, Zea mays
  Coding DNA Sequence Number=SeqID_40198
  Gene Ontology: Cellular component=nucleus; Biological process =regulation of transcription, DNA-dependent
  Homolog annotation: Hit_ID=Q8L8G4; Match level="QueryCoverage=68%, HitCoverage=18%, E-value=2e-17, Identity=54%"; Hit description =Nucleosome/chromatin assembly factor group C
MPLLWAVPRRKNIRIIEFKVSTTTHSRRHEMEAIPEYMLCTDDWLQVNGIMQLPQNIKIIATHTDSPNVLIWDVEAQPNRHAVLGASESRPDMIWFIVLFSVPDILFFGTWLTSIYYLFRY

SEQ ID NO: 81978 - protein, 95 aa, Zea mays
  Coding DNA Sequence Number=SeqID_40199
  Gene Ontology: Cellular component=nucleus; Biological process =regulation of transcription, DNA-dependent
  Homolog annotation: Hit_ID=Q8L8G4; Match level="QueryCoverage=62%, HitCoverage=13%, E-value=3e-24, Identity=85%"; Hit description =Nucleosome/chromatin assembly factor group C
MTVDTLLSEHSAQEFCSVGDDACLILWDARTGTAPAVKVEKAHTGDVHCVDWNPLDVNYILSGYDGIKVQFSIIVETNSISISSLYVQVMNLSID

SEQ ID NO: 81979 - protein, 306 aa, Zea mays
  Coding DNA Sequence Number=SeqID_40200
  Gene Ontology: Mol. function=protein binding; Cellular component =nucleus; Biological process=regulation of transcription, DNA -dependent
  Homolog annotation: Hit_ID=Q8L8G4; Match level="QueryCoverage=99%, HitCoverage=70%, E-value=1e-137, Identity=77%"; Hit description =Nucleosome/chromatin assembly factor group C
  Pfam annotation: Domain name=WD40; Domain location=140-216; Score =16.2; E_value=0.12; Accession=PF00400.22; Description=WD domain, G -beta repeat
  Pfam annotation: Domain name=WD40; Domain location=21-60; Score=13.3; E_value=0.9; Accession=PF00400.22; Description=WD domain, G-beta repeat
  Pfam annotation: Domain name=WD40; Domain location=95-134; Score =29.4; E_value=1.2e-05; Accession=PF00400.22; Description=WD domain, G-beta repeat
  Pfam module annotation: Pfam domain module=WD40::WD40::WD40; Domain location=140-216::21-60::95-134
VLIWDVEAQPNRHAVLGASESRPDLILTGHKENAEFALAMCPAEPYVLSGGKDKSVVLWSIQDHISALGDSSSSPGASGSKQSIKTANEKESPKVDPRGIFHGHDSTVEDVQFCPSSAQEFCSVGDDACLILWDARTGTAPAVKVEKAHSGDVHCVDWNPLDVNYILTGYDGIKAQFSIIVETNSISISSLYVQWSPDRASVFGSSAEDGFLNVWDHEKVGKKKNSNVPAGLFFQHAGHRDKIVDFHWNSSDPWTIVSVSDDGESTGGGGTLQIWRMSDLIYRPEDEVLAELENFKAHLASCAPKN

SEQ ID NO: 81980 - protein, 195 aa, Zea mays
  Coding DNA Sequence Number=SeqID_40201
LRVLSAINAEAARFRGLYIRFDPLAYVASLAVLVSFYGGLDPTVKTGMHHLSLPRGALGPAHVRRRVFTSLAEEANLGYMGPAGYRLSAAACPALWARWLRRRLRCYLLPLCPGRGCPSTAWATVAPCVGPAHPPLLLPAGRTGGVVQDVVRRGGGGSVLGWSCLHSHWSAGSKDPFMRAEIAAAHRCRGGHRRW

SEQ ID NO: 81981 - protein, 188 aa, Zea mays
  Coding DNA Sequence Number=SeqID_40202
MKTLHPYNTLSPREEWRPTPPHWAGPRAPRGKERWCISVFTVGSGPPKNTGPLYVQAQGPKKARQDPWEGSGPPPSKRDFRFDIWRARYGLGFKFLLVSSLSMMVWIIEHRVETSKDFAMEQKVASSAPRVPDRPDSGTAVIHAAQQHTPAQASRSPSRAAPTTLSAARELLRHPLAPRLHWGHEAVA

SEQ ID NO: 81982 - protein, 65 aa, Zea mays
  Coding DNA Sequence Number=SeqID_40203
MADVPRVDSTVSMREYMEAICVAKSPSWHWTSARAVVIAANSDGWAEAAVSASLDPGISDTRLKE

SEQ ID NO: 81983 - protein, 194 aa, Zea mays
  Coding DNA Sequence Number=SeqID_40204
MDVVCPVLVGASTVTVDCCAGIGNEGRWGGLDGLLIVDVANSKRWKRGTAVDGGGEKALGMVCGSEEKDGVGEVVCGNGGNDGIEDGECGNDSKCGGSEVVVCDGADMVVRGGGRVDSTVSMREYMEAICVAKSPSWHWTSARAVVIAANSDGWAEAAVSASLDPGISDTRLVELPRLRRLYEWLMVGGLEEEV

SEQ ID NO: 81984 - protein, 63 aa, Zea mays
  Coding DNA Sequence Number=SeqID_40205
MTVTVGFGFGMKVFSHGKGMRDMKLQPEGEELYPIKDMTQICSAERRVLLYLNHDMVFIPINI

SEQ ID NO: 81985 - protein, 665 aa, Zea mays
  Coding DNA Sequence Number=SeqID_40206
  Gene Ontology: Mol. function=cysteine-type peptidase activity; Biological process=proteolysis
  Homolog annotation: Hit_ID=Q109R5; Match level="QueryCoverage=86%, HitCoverage=50%, E-value=3e-37, Identity=30%"; Hit description=Ulp1 protease family, C-terminal catalytic domain containing protein
  Pfam annotation: Domain name=Peptidase_C48; Domain location=65-286; Score=54.7; E_value=3e-13; Accession=PF02902.9; Description=Ulp1 protease family, C-terminal catalytic domain
MESLFVGLSHNKPKKSVATAIVREVLSHDWLLLDYICTQGDLALIDFIKEIPCEPRVEVVLIDDAFVERKWMECLFQPNSYLGDEVIDCYINLIKAQKHLKCQSGGRVHIENAFQFNFLKRDGDVEIKTEELYPIKDMTQICSAERRVLLYLDHDMVFIPINIRETHWYLAVIHARNMEIQVLDSLGSSQDRKDLTDSIKGLQRQIDMISQRMELKDHRWPDLQVASWPLREIDMGYAKQTDSSSCGLFLLNYIEYWTGDELSDSFTQDDMSHFRKKMAAILLSSDLNKRRGCLLYKNEKEVDSGSPSDVEILENPTDSNKRKLLHVLDDSEVVYEDEEGPITQADLQRWFVDDWDKRAPVKVTPLTSEGCTNDFLMVGLSTKDMPVTKADSIDVLCDYIMAINDDTTLERTWVRSFNPFKIEISVKDLQNILTTNQDMILRCFDMAVRLLANKESRRPKEEIINNRKHYMDMRFWRMVGFGKLPKYHQDPTTEGLAKTLDCWPSMNYYITGCRYVLMPWKFNGCYALFVIDHVKKHVTFIDFTPTQDWCKHMPYKRFAEAIIMTSKKYKIAYSKKRSGWAEDIFKWEHTIQTGVPIDLRGFNTSYLVLQAMAMWGNDRPLKFVGDAKTLRRNFVIDLLSYEDNSCRYAIPANVQQRIIDIAKKD

SEQ ID NO: 81986 - protein, 54 aa, Zea mays
  Coding DNA Sequence Number=SeqID_40207
MAGGGKLAGAKEGRLASEGEHGVRLAGFADWIKRYGGVKVGFVSLPSTERRSRV

SEQ ID NO: 81987 - protein, 108 aa, Zea mays
  Coding DNA Sequence Number=SeqID_40208
MAGGGKLAGAKEGRLASEGFADWIKRYGGVKLGLSHCRAQRVDPGFDVSRARVPMPCSVGLHEMMALELALRRTIGDTGVSQPSSLKGISSRDLGQSPPGVKRRVRLT

SEQ ID NO: 81988 - protein, 142 aa, Zea mays
  Coding DNA Sequence Number=SeqID_40209
MEQWPRRKKGAEGLTGGETALEASPEIKEDVCARNLRMAHWIARSTQLGKLHGPLAKLIEGQAQLGRGWSELAAVAEARAVMAGGGKLAGAKEGRLASEGFADWIKRYGGVKLGLSHCRAQREDPGFDVSRARVPMPSSSMR

SEQ ID NO: 81989 - protein, 100 aa, Zea mays
  Coding DNA Sequence Number=SeqID_40210
MAHQIARSTRGRGRPMFGEDDLGSPVRFCRFRELGKLHGPLAKLTEGQAQLGRGWSELAAVAEARAVMASGRKLAGAKEGVEHEAAQREVVFKRGLAPNL

SEQ ID NO: 81990 - protein, 1556 aa, Zea mays
  Coding DNA Sequence Number=SeqID_40211
  Gene Ontology: Mol. function=helicase activity; Biological process =viral genome replication
  Homolog annotation: Hit_ID=Q1EPC6; Match level="QueryCoverage=88%, HitCoverage=87%, E-value=0.0, Identity=64%"; Hit description=DNA helicase homolog, putative
  Pfam annotation: Domain name=DUF889; Domain location=1397-1556; Score= 89.3; E_value=1.2e-23; Accession=PF05970.5; Description=Eukaryotic protein of unknown function (DUF889)
MTVEQKNEKSIKRREVRQRNKGPPIQPEASRVSPSDGCSTIDFTNFPTQVPNLNLDDDSDWLHRNETFKSDDVFTTRDLLTPGGVHETIGNTPNHNLGRTAYFRERYKNLTPAERELRHERLRLYNNTPKRKESKIEYIRKRRALLADTLSQESIAMESPTYTPKVVHPTTDAIEPDGSAVTPCDWVIPDIASNPFLPASTKTEDADSLRMSTRPLRRKQHVPRGERQAILARRNRQFEASISRNMATATEDTISDAEEGDDWTHTQSKPRVISNVDDDDGVVFEDDADENEGYLFTGQYEDTDEDIEIDGSQDESTATDVPDPYDKVYSNIPEETHMLKTVPNCSYCTAKKFEYESPGFCCRGGKVELAPLETPTQLKRLWDSADSDARHFRDNIRFFNGHFSFTSLYCCLDSMTTNVRDSGIYTFRAQGMMYHNIKSFGREGGAEHKHLELYFYDDDPTLEHRFRKCREEHQQKDKEVIRQIVDILRGNPYSEHLRTMGHVDNLDDYRIALNLDQTLNQKTYNTPLTSEVAAVWIEGSEGRGQFSKSVMLHGKDSSSHCIRSYHGCYDALSYPLFFPRGELGWHANIPKVGVSMDEVDAYRATHRASNANDEDAESPSHLCVSVRDYYCYKFQIRPGVFNPILHGKRLFQQFAVDTYIKIESSRLDYIRRNQDRLRADLYQGLVDSMVDGDIRAEKVGKRTVLSTSFIGGPRDMRRRYMDAMALVRKFGKPDIFLTMTCNPNWDEIRRELLPGQTPQDRPDLVVRVFHAKLQELKHRLTKQDILGKVRAYVYVVEFQKRGLPHAHFLLIMQRKYKLTCPEQYDLLISAEIPSNKYPELRKMVIKHMMHGPCGSLNPNCPCTKGRNSCKNHYPRPFSDTTLQGKDSYPIYRRHDDDRKEKVRGCELDNRWVVPYNPYLLRLFNCHINVEACGSIKAVKYLFKYIYKGHDRASVVMRDASKADDDVDEIKQYRDARWVTPPEALWRIYGFELSQISPPVMQMQLHLPNMHMVAFHERQMVERVVNHPGADRSMLTAYFEANRLHEEARGILYRDFPEWYTWQSGKGKVWQRRKRDTGGQVGRIVSAHPAEGERYYLRVLLNHVTGAASYVDLRTVDGVTLPTFREAAERRGLLESDNTLDECLTERALFQMPSALRRLFATILVYCEPSDVAVLWQKHKDSMSEDYQHRSQNKTHVEQMVLIDIRNMLQSMGKDIKTLPLPPIIDAYDDAIGTAREVYEEEIIQPTVGDVALKDSLNEEQRAAYDKIMSAVDTDQGGLFFVDGPGGTGKTYLYRVLLATLRNQGKIAVATATSGVAASIMPGGRTAHSRFKIPLTIDDGAVCSFTKQSGTAELLRKASLIIWDEASMTKRQAVEALDNSMRDIMGRPALPFGGKTIVFGGDFRQVLPVVRKGSRAQVVASSLRMSYLWESMSHLKLVSNMRAKNDPWFAEFLLRVGGGTEETNIDGDIRLPDDVCVPYTGSDNDLDNLIDFAFPNLNENMSDSTYITSRAILSTRNDWVDMINVKMIDRFLKGSIWCTIVSIAPWMIPITTTHPSS

SEQ ID NO: 81991 - protein, 1518 aa, Zea mays
  Coding DNA Sequence Number=SeqID_40212
  Gene Ontology: Mol. function=helicase activity; Biological process =viral genome replication
  Homolog annotation: Hit_ID=Q1EPC6; Match level="QueryCoverage=90%, HitCoverage=87%, E-value=0.0, Identity=64%"; Hit description=DNA helicase homolog, putative
  Pfam annotation: Domain name=DUF889; Domain location=1359-1518; Score= 89.3; E_value=1.2e-23; Accession=PF05970.5; Description=Eukaryotic protein of unknown function (DUF889)
MKNHFATVDLAVPNLNLDDDSDWLHRNETFKSDDVFTTRDLLTPGGVHETIGNTPNHNLGRTAYFRERYKNLTPAERELRHERLRLYNNTPKRKESKIEYIRKRRALLADTLSQESIAMESPTYTPKVVHPTTDAIEPDGSAVTPCDWVIPDIASNPFLPASTKTEDADSLRMSTRPLRRKQHVPRGERQAILARRNRQFEASISRNMATATEDTISDAEEGDDWTHTQSKPRVISNVDDDDGVVFEDDADENEGYLFTGQYEDTDEDIEIDGSQDESTATDVPDPYDKVYSNIPEETHMLKTVPNCSYCTAKKFEYESPGFCCRGGKVELAPLETPTQLKRLWDSADSDARHFRDNIRFFNGHFSFTSLYCCLDSMTTNVRDSGIYTFRAQGMMYHNIKSFGREGGAEHKHLELYFYDDDPTLEHRFRKCREEHQQKDKEVIRQIVDILRGNPYSEHLRTMGHVDNLDDYRIALNLDQTLNQKTYNTPLTSEVAAVWIEGSEGRGQFSKSVMLHGKDSSSHCIRSYHGCYDALSYPLFFPRGELGWHANIPKVGVSMDEVDAYRATHRASNANDEDAESPSHLCVSVRDYYCYKFQIRPGVFNPILHGKRLFQQFAVDTYIKIESSRLDYIRRNQDRLRADLYQGLVDSMVDGDIRAEKVGKRTVLSTSFIGGPRDMRRRYMDAMALVRKFGKPDIFLTMTCNPNWDEIRRELLPGQTPQDRPDLVVRVFHAKLQELKHRLTKQDILGKVRAYVYVVEFQKRGLPHAHFLLIMQRKYKLTCPEQYDLLISAEIPSNKYPELRKMVIKHMMHGPCGSLNPNCPCTKGRNSCKNHYPRPFSDTTLQGKDSYPIYRRHDDDRKEKVRGCELDNRWVVPYNPYLLRLFNCHINVEACGSIKAVKYLFKYIYKGHDRASVVMRDASKADDDVDEIKQYRDARWVTPPEALWRIYGFELSQISPPVMQMQLHLPNMHMVAFHERQMVERVVNHPGADRSMLTAYFEANRLHEEARGILYRDFPEWYTWQSGKGKVWQRRKRDTGGQVGRIVSAHPAEGERYYLRVLLNHVTGAASYVDLRTVDGVTLPTFREAAERRGLLESDNTLDECLTERALFQMPSALRRLFATILVYCEPSDVAVLWQKHKDSMSEDYQHRSQNKTHVEQMVLIDIRNMLQSMGKDIKTLPLPPIIDAYDDAIGTAREVYEEEIIQPTVGDVALKDSLNEEQRAAYDKIMSAVDTDQGGLFFVDGPGGTGKTYLYRVLLATLRNQGKIAVATATSGVAASIMPGGRTAHSRFKIPLTIDDGAVCSFTKQSGTAELLRKASLIIWDEASMTKRQAVEALDNSMRDIMGRPALPFGGKTIVFGGDFRQVLPVVRKGSRAQVVASSLRMSYLWESMSHLKLVSNMRAKNDPWFAEFLLRVGGGTEETNIDGDIRLPDDVCVPYTGSDNDLDNLIDFAFPNLNENMSDSTYITSRAILSTRNDWVDMINVKMIDRFLKGSIWCTIVSIAPWMIPITTTHPSS

SEQ ID NO: 81992 - protein, 187 aa, Zea mays
  Coding DNA Sequence Number=SeqID_40213
MDWTSTPPAGWPGRRLPAEWTETARPRGLYVRLRPLADVTGNKPHGSIGSPPERGAQEHRIKPGHVSVPGPLLRPGYPLSWDLAVGGVDPAQRGPDSRTSPKGSGLALHGEPWTILGDPGREYRGPALSRGGPDLLKGISLAKLQSYPQAYTFKLRQSYAHIVCPKLLSSCPRLSVPHPDLRGKTRV

SEQ ID NO: 81993 - protein, 184 aa, Zea mays
  Coding DNA Sequence Number=SeqID_40214
MPLDSDRWSFYLLGPPGCPVQTRHVLFNVRCASEFRRPLFLGAPDTVRCTPDSPVNYSGVPLEIPEGGKFELESSGAPDIVRWCTGHTGQSGAPRPEATRPLRNKCRDRTAQRPYVRLRPLADVTGYPLSWDLAVGGVDPAQRGPDSGPHPRGLACLHGSPGPYSEIRVVSIGVQRFLEEVRTY

SEQ ID NO: 81994 - protein, 108 aa, Zea mays
  Coding DNA Sequence Number=SeqID_40215
MKTKALEVTVPEVMRGGGLSTAVADFDQRMNGDEQLPPTGNRIRPGIGSYTCGGTFQCSRTYGEEGAPNFDLYPGQDSPLPRGSRRGWSHVEREIVEWAELRGFGPTR

SEQ ID NO: 81995 - protein, 193 aa, Zea mays
  Coding DNA Sequence Number=SeqID_40216
  Subcellular localization annotation: CTP_CleavageSite=56; ConfidenceScore=5.04e-01
MAMNYDEQLPPTGNRIRPGVGSYTCGGTLQCSRYTPPRPRNRQQQHRRRRRDFTVKAMASGCLVLGSRGREGEMWSGYIGAEREFGHARPNPRSLAAGFYRSPMNHAELNRSCSWPRNLWRGGCAKLRFIPRAGFAPTPRTPQQPEKRGKPGQWIARDFWRRACRNLLAHASVKGMNPTCGPQPLVKRHAPHG

SEQ ID NO: 81996 - protein, 212 aa, Zea mays
  Coding DNA Sequence Number=SeqID_40217
MKMLHFDELTKEHEELKCSHVDLVQSKSFFELEFAGTKDDTYQKLKEENERLKMSLTQLKGKYIAQPYQDNRDHMVKKLETGTTVACTKSLEENVKDLRIVKRKEQKKKINASDKSLNHASMQGNKELSCAKTYNMEESQRMLTYENLQESKCKPQASRVTLQPKEESIFNKFGRKKSQLQREDTQMKKEDIKSNNTYLDNEIFKTINGVVA

SEQ ID NO: 81997 - protein, 249 aa, Zea mays
  Coding DNA Sequence Number=SeqID_40218
MAKSPKIKRYRDQKRHMEVHCQTSFCRNEDGFPKLLIACTVRLGIRNQLEYTGQDVERRNHQLHVDLTTTQACGAALESREGIIVQALKQAKDEHIQKLIEAYLVTHNQRRAMRIQEPPSSNPIQLIRAEDPQILEGLSVSIKGEKKAWELLDGAIVLEGMPVSPQDMDKQEHPELFDPLTMKKIPAPSPEVKEEATSTPLASPPFESLELQEPVLLGEEFDPILPSQSPLEGVINTSSLLTHPVDVLE

SEQ ID NO: 81998 - protein, 195 aa, Zea mays
  Coding DNA Sequence Number=SeqID_40219
DVERRNHQLHVDLTTTQACGAALESREGIIVQALKQAKDEHIQKLIEAYLVTHNQRRAMRIQEPPSSNPIQLIRAEDPQILEGLSVSIKGEKKAWELLDGAIVLEGMPVSPQDMDKQEHPELFDPLTMKKIPAPSPEVKEEATSTPLASPPFESLELQEPVLLGEEFDPILPSQSPLEGVINTSSLLTHPVDVLE

SEQ ID NO: 81999 - protein, 173 aa, Zea mays
  Coding DNA Sequence Number=SeqID_40220
MARELGRPEKRGLGQGGARRPWRWGAARYRDGHTARRGALAGAGAAEELGRELDDNRHGKKRRELGLEVADRARPVPSGDEFVGTGTNDDSYQKLKEENERLKKSLTQLKGKCIAQPSQDNRDHMVKKLETGTTVACTTSLEENVKELRIAKRKKQKMNFNTSYKSLNHASTK

SEQ ID NO: 82000 - protein, 114 aa, Zea mays
  Coding DNA Sequence Number=SeqID_40221
MEAKRWGWAEHRELHGEGARSARETPGWGREERGGHGGGELRAIEMGTRHAGELWPALELQRSSAGREAAQGAGPRASKGGRRPGLEDAAARDACAGNSTTTAMGRREGSSDWS

SEQ ID NO: 82001 - protein, 467 aa, Zea mays
  Coding DNA Sequence Number=SeqID_40222
MKGRFTVGRLMLLVRRFAFQTAGCPENEGAHNCGAVARSFFGSVCVTCGAWPPCHKVGTLMHVGGDFARDASGARVGRSAFKKGSISRVVAMPHSSSDHRALPPSGPPDGVCRIFIMQPGRNLRLVVIHKDDYQPCGGEKQARLWPPPALSFKDVHHPRWGGGRAESGLRLSRGLAGPLLPPTFGGEGRSPALRRRRTLAMRGRPSEAPSAATCLAPQPGWLWCRLRRCLLPLGRSVAARPPHGRRLRRAQVGHIHGFSRAVGRTGGAYKTSYAAGAAATFLDGLVLTPAMRTGARTSSCMLGRSPFAGTALVRRWSLSSVLRWSPPLVRLPTVEVVASAGETISAICRRDPDSLALMASLSPPVGRWGQGPFRSGVHAEMIAAAWRVVDTEVATAVGADVVASAGEPLGASYPVALTGVEVVHTCRVEMELGLHLKTVVILSLFVRTRSFSPGGQVACLDPLGSRF

SEQ ID NO: 82002 - protein, 326 aa, Zea mays
  Coding DNA Sequence Number=SeqID_40223
MKGRFTVGRLMLLVRRFAFQTAGCPENEGAHNCGAVARSFFGSVCVTCGAWPPCHKVGTLMHVGGDFARDASGARVGRSAFKKGSISRVVAMPHSSSDHRALPPSGPPDGVGHIHGFSRAVGRTGGAYKTSYAAGAAATFLDGLVLTPAMRTGARTSSCMLGRSPFAGTALVRRWSLSSVLRWSPPLVRLPTVEVVASAGETISAICRRDPDSLALMASLSPPVGRWGQGPFRSGVHAEMIAAAWRVVDTEVATAVGADVVASAGEPLGASYPVALTGVEVVHTCRVEMELGLHLKTVVILSLFVRTRSFSPGGQVACLDPLGSRF

SEQ ID NO: 82003 - protein, 142 aa, Zea mays
  Coding DNA Sequence Number=SeqID_40224
  Homolog annotation: Hit_ID=Q41587; Match level="QueryCoverage=38%, HitCoverage=12%, E-value=2e-08, Identity=50%"; Hit description=Delta- 24-sterol methyltransferase
MQTVLPSVAARTSFDELPEPAEHNRRYVKYHDLHGGEQESRKSNYADLVSHSESHLHNFLLYESGKQGFYEYGWGDSFHFVLQTESQMSENDFTFPCEGSCEEDGIVLIGEIGGMAEEDVATFIQSLTGKLKRTQASPSFYM

SEQ ID NO: 82004 - protein, 295 aa, Zea mays
  Coding DNA Sequence Number=SeqID_40225
  Gene Ontology: Mol. function=methyltransferase activity; Cellular component=mitochondrial outer membrane; Biological process=metabolic process
  Homolog annotation: Hit_ID=Q84M50; Match level="QueryCoverage=82%, HitCoverage=96%, E-value=8e-83, Identity=51%"; Hit description =Putative endosperm C-24 sterol methyltransferase
  Pfam annotation: Domain name=Methyltransf_11; Domain location=88-187; Score=36.3; E_value=1e-07; Accession=PF08241.2; Description =Methyltransferase domain
  Pfam annotation: Domain name=Sterol_MT_C; Domain location=196-283; Score=82.2; E_value=1.6e-21; Accession=PF08498.1; Description=Sterol methyltransferase C-terminal
  Pfam module annotation: Pfam domain module=Methyltransf_11::Sterol_MT_ C; Domain location=88-187::196-283
MATFPGTVLRPFDPEPSKCPGERSSSFVVTMTNESSGVFVAKSSIEYVKYHDLHGGEQESRKSNYADLANKYYDLVTGFYEYGWGDSFHFAGGYPGETSREAIKRHQHFMALQLGLKKGMKEHIFSAGLSEQCCSLKGILGDFMNMPIADNTFDAAYAIQATCYAPEAQGVYSEVYRVLKPGQYFALDEWCLTDRFDPNNAKHLTAKAEIELGDGLPDIRTTRQCVQAMKDAGFEVNTLEFLRIAPAGSVGAYNVLTSASDGLLKGGREGIFTASFFVLGRKPLKESEIVNGGNL

SEQ ID NO: 82005 - protein, 195 aa, Zea mays
  Coding DNA Sequence Number=SeqID_40226
  Gene Ontology: Mol. function=inositol or phosphatidylinositol phosphatase activity; Biological process=vascular tissue development (sensu Tracheophyta)
  Homolog annotation: Hit_ID=Q6ZK18; Match level="QueryCoverage=91%, HitCoverage=25%, E-value=6e-36, Identity=82%"; Hit description =Putative inositol 1,4,5-trisphosphate 5-phosphatase
  Pfam annotation: Domain name=WD40; Domain location=10-47; Score=10.0; E_value=2.5; Accession=PF00400.22; Description=WD domain, G-beta repeat
  Pfam annotation: Domain name=WD40; Domain location=50-86; Score=15.2; E_value=0.23; Accession=PF00400.22; Description=WD domain, G-beta repeat
  Pfam module annotation: Pfam domain module=WD40::WD40; Domain location=10-47::50-86
MGAADAVRRVATKGTCVEDNRRTEAVAQAMNGTIWSGCTDGSIIVWDGNGNRLREFHYHSSSVRCIKTLGDRVWVGYTSGTIQVIDVKASVKIAFNLANRCQNSEENNLVGLEGSGNGQWWIDSIGKTLDEGISFHRVGSRQLAGLLIAAWATNDLRPHVGDVDATAVPCGFGRAIGNKVSGIICLICVLPLGIA

SEQ ID NO: 82006 - protein, 449 aa, Zea mays
  Coding DNA Sequence Number=SeqID_40227
  Gene Ontology: Mol. function=inositol or phosphatidylinositol phosphatase activity; Cellular component=integral to membrane; Biological process=vascular tissue development (sensu Tracheophyta)
  Homolog annotation: Hit_ID=Q6ZK18; Match level="QueryCoverage=99%, HitCoverage=42%, E-value=1e-162, Identity=63%"; Hit description =Putative inositol 1,4,5-trisphosphate 5-phosphatase
  Pfam annotation: Domain name=Exo_endo_phos; Domain location=2-219; Score=73.1; E_value=9e-19; Accession=PF03372.13; Description =EndonucleaseExonucleasephosphatase family
ATNDLSPHVGDVDTAAVPCGFGRAIGNKGGVGLRIRVFGRRICFVNNHFAAHQENVSRRNADFDRIYRTMTFTKPQGSAASATAVQLHKAANENQADEGRPDLAEADMVIFLGDLNYRLDGITYDEARDMVSQRSFDWLRERDQLRAEMKAGNVFQGMREGPIRFPPTYKFQRHQSGLSGYDSGEKKRIPAWCDRILYRDSRPVPIAECSLECPVVAAITAVDIARVDELIRRQEFGKIIESNKKVRSLLRELRSVPDTVVNANNITLENHQEDVILRITNNCETSKAAFEILCEGQTVRKQGGTQSEELLPRASFGFPLWLEVQPSMGLIGPGETAEVVVRHDDFLTQEEYVDGAQRNRWREATRDLEVVLSVTVTGSSSSSAEAVAHRVTVRHCCPAPPAPLPANRRSAAASPRDDVAASDNQSNHLHRSDLASFGSSEVRDLCGGL

SEQ ID NO: 82007 - protein, 103 aa, Zea mays
  Coding DNA Sequence Number=SeqID_40228
MRGKANCCCSDRVQLSVLHPERRSCHARVAAVTSLAEGANFNNAGLNLRPLCDELEPEAAVSAWTEAESARKEASSAQEQAASQAEEVQQRWLELGQVIRERD

SEQ ID NO: 82008 - protein, 71 aa, Zea mays
  Coding DNA Sequence Number=SeqID_40229
MGAGDAHRPYAERLLLVRRSARGVDRCRPRRRPKPGGPRHPRQPSSARTKPEMRKEADEREALTSRTAGRP

SEQ ID NO: 82009 - protein, 211 aa, Zea mays
  Coding DNA Sequence Number=SeqID_40230
MKNVAKCDTWCELQNPANHRVFERKLRPKPSGGGHVCLGVTPKDTPNTPPRGEGRGVWPPAPQGERPGARPAIRPYGPIERSSLSSDRDPSPNRGGKLRPRLNTGERPIANKYREGKDEKDFEKRVKECLKLPGGKRMGAGDAHRPYAERLLLVRRSARGVDRCRPRRRPKPGGPRHPRQPSSARTVSARLWRAPRGATPQRPASSPSDPS

SEQ ID NO: 82010 - protein, 215 aa, Zea mays
  Coding DNA Sequence Number=SeqID_40231
  Homolog annotation: Hit_ID=Q6CQF2; Match level="QueryCoverage=23%, HitCoverage=62%, E-value=5e-08, Identity=58%"; Hit description =Kluyveromyces lactis strain NRRL Y-1140 chromosome D of strain NRRL Y- 1140 of Kluyveromyces lactis
  Subcellular localization annotation: CTP_CleavageSite=46; ConfidenceScore=5.10e-01
VPARGRPFGPKDPSSDRACPRTATPEASSATDRAQVLWKGTPGRVRAPSGPDPVAPRGAVNESGCLGMQPKSGAVVGADGIRAPLARPSGRCAATACELPIRPVLKHGPRSLTCVRVDGFRNLRCARKADERGGPHGPHRWSTLIFCEGFQKEHACRDPKDGELCLSGAKPEETLVEARSDTDDSWSPHEFYRVKPMIRGIGGATPSTYSQTLNR

SEQ ID NO: 82011 - protein, 66 aa, Zea mays
  Coding DNA Sequence Number=SeqID_40232
  Homolog annotation: Hit_ID=Q6CQF2; Match level="QueryCoverage=50%, HitCoverage=41%, E-value=1e-07, Identity=76%"; Hit description =Kluyveromyces lactis strain NRRL Y-1140 chromosome D of strain NRRL Y- 1140 of Kluyveromyces lactis
FELEHACRDPKDGELCLSWAKPEETLVEARSDTDDSWSPHEFYRVKPMIRGIGGATPSTYSQTLNR

SEQ ID NO: 82012 - protein, 66 aa, Zea mays
  Coding DNA Sequence Number=SeqID_40233
  Homolog annotation: Hit_ID=Q6CQF2; Match level="QueryCoverage=50%, HitCoverage=41%, E-value=1e-07, Identity=76%"; Hit description =Kluyveromyces lactis strain NRRL Y-1140 chromosome D of strain NRRL Y- 1140 of Kluyveromyces lactis
FELEHACRDPKDGELCLSGAKPEETLVEARSDTDDSWSPHEFYRVKPMIRGIGGATPSTYSQTLNR

SEQ ID NO: 82013 - protein, 66 aa, Zea mays
  Coding DNA Sequence Number=SeqID_40234
  Homolog annotation: Hit_ID=Q6CQF2; Match level="QueryCoverage=50%, HitCoverage=41%, E-value=1e-07, Identity=76%"; Hit description =Kluyveromyces lactis strain NRRL Y-1140 chromosome D of strain NRRL Y- 1140 of Kluyveromyces lactis
FELEHACRDPKDGELCLSGAKPEETLVEARSDIDDSWSPHEFYRVKPMIRGIGGATPSTYSQTLNR

SEQ ID NO: 82014 - protein, 122 aa, Zea mays
  Coding DNA Sequence Number=SeqID_40235
  Homolog annotation: Hit_ID=Q6CQF2; Match level="QueryCoverage=45%, HitCoverage=62%, E-value=5e-09, Identity=58%"; Hit description =Kluyveromyces lactis strain NRRL Y-1140 chromosome D of strain NRRL Y- 1140 of Kluyveromyces lactis
TACELPIPTHLENTDQRSMTCVRVDGVQKPEMRKEADEAGGPHEPHRWPTQIFCEGFELEHACRDPKDGELCLSGAKPEETLVEARSDTDDSWSPHEFYRVKPMIRGIGGATPSTYSQTLNR

SEQ ID NO: 82015 - protein, 151 aa, Zea mays
  Coding DNA Sequence Number=SeqID_40236
  Homolog annotation: Hit_ID=Q6CQF2; Match level="QueryCoverage=24%, HitCoverage=45%, E-value=3e-08, Identity=72%"; Hit description =Kluyveromyces lactis strain NRRL Y-1140 chromosome D of strain NRRL Y- 1140 of Kluyveromyces lactis
PKPTSEHPCRTVAILAFPLGIKDPSSDRACPRTATPEASSATDRAQVLWKGTPGRVRAPSGPDPVAPRGAVNESGCLGMQPKSGGFELEHACRDPKDGELCLSGAKPEETLVEARSDTDDSWSPHEFYRVKPMIRGIGGATPSTYSQTLNR

SEQ ID NO: 82016 - protein, 375 aa, Zea mays
  Coding DNA Sequence Number=SeqID_40237
  Gene Ontology: Mol. function=protein kinase activity; Cellular component=integral to membrane; Biological process=protein amino acid phosphorylation
  Homolog annotation: Hit_ID=Q949V3; Match level="QueryCoverage=88%, HitCoverage=54%, E-value=5e-68, Identity=44%"; Hit description =Putative receptor protein kinase
  Pfam annotation: Domain name=LRR_1; Domain location=109-131; Score =9.2; E_value=5.5; Accession=PF00560.23; Description=Leucine Rich Repeat
  Pfam annotation: Domain name=LRR_1; Domain location=17-40; Score=8.3; E_value=7.9; Accession=PF00560.23; Description=Leucine Rich Repeat
  Pfam annotation: Domain name=LRR_1; Domain location=41-63; Score =13.3; E_value=0.86; Accession=PF00560.23; Description=Leucine Rich Repeat
  Pfam annotation: Domain name=LRR_1; Domain location=87-108; Score =11.0; E_value=2.5; Accession=PF00560.23; Description=Leucine Rich Repeat
  Pfam annotation: Domain name=Pkinase_Tyr; Domain location=246-375; Score=-166.3; E_value=0.029; Accession=PF07714.7; Description =Protein tyrosine kinase
  Pfam module annotation: Pfam domain module=LRR_1::LRR_1::LRR_1::LRR _1::Pkinase_Tyr; Domain location=109-131::17-40::41-63::87-108::246 -375
  Subcellular localization annotation: CTP_CleavageSite=70; ConfidenceScore=5.05e-01
MALLASRPPTALGRLTNLRALSLCSNRVLGTIPNNVLQLPGLKALFLQHNLLSGPIPPGIQRLGGLERLVLSYLSGPIPFTLNSLTALRVLRLDGNRLSGSIPSISIAGLGSFDVSDNNLNGPIPKSLSHFPRESFVGNLQLCGDPLPPCSSPFFPPAPSPRRARPRAGLIQEAEALRGRNRGGQPPPASGVGSVLTSSSKEDLGGDAFGSAAAVAAAAAAAAGEQSRLVFVGKGAGYSFNLEDLLRPSAEVLGKGSVGTSYKAVLEEGTTVVVKRLKDVAVQRREFDAHMEALGRVEHQNVLPIRAYYFSKDEKLLVYDYLPNGSLSAMLHASYSGLVALVEEKDNQIQKAEFLMDIVSNEEMALIDTARRRNL

SEQ ID NO: 82017 - protein, 44 aa, Zea mays
  Coding DNA Sequence Number=SeqID_40238
  Homolog annotation: Hit_ID=Q5ZBN0; Match level="QueryCoverage=93%, HitCoverage=6%, E-value=1e-14, Identity=85%"; Hit description =Receptor-like protein kinase 1-like
MEALGRVEHRNVLPIHAYHFSKDEKLLVYDYLPNGSLSAMLHEK

SEQ ID NO: 82018 - protein, 69 aa, Zea mays
  Coding DNA Sequence Number=SeqID_40239
  Homolog annotation: Hit_ID=Q5GA19; Match level="QueryCoverage=95%, HitCoverage=21%, E-value=3e-23, Identity=80%"; Hit description =Hypothetical protein adh1E
MPQSAITSKLATSPLPARYSLQEASTPCFCLYSLPWQQAELEPKISQCDHGMDMLKNLTIIPVTVDSLA

SEQ ID NO: 82019 - protein, 315 aa, Zea mays
  Coding DNA Sequence Number=SeqID_40240
  Homolog annotation: Hit_ID=Q5GA19; Match level="QueryCoverage=97%, HitCoverage=99%, E-value=1e-172, Identity=98%"; Hit description =Hypothetical protein adh1E
MVLLGRLNALTCFPEVQRENVKAINSGEQSQFARTAQLSSPAHVGKSQSPVMDLSTTFTTSLQNKSSLLRKNNALTDSGGLIRSSRSEFGRKVPSVLDTRASPHGPPTSNMRSSAGDMFPTVGQRVESPFLRGAKDISSRKGEEGFKKGIKYGDHDPVPMYLNLSSGDTPMKDYRTSLLKTAVNKTTIFQGKDSVGKGELHFGSRAEKPFILNGTGVGQNGLAKVSGYAGFREDYKVPTKENILSSSKRSSIDGAEASKVCYDRYSLQEASTPCFCLCSLPWQQAELEPKISQCDHGMDMLKNLTIIPVTVDSLA

SEQ ID NO: 82020 - protein, 325 aa, Zea mays
  Coding DNA Sequence Number=SeqID_40241
  Homolog annotation: Hit_ID=Q5GA19; Match level="QueryCoverage=77%, HitCoverage=81%, E-value=1e-140, Identity=100%"; Hit description =Hypothetical protein adh1E
MVTEFCAICIKRNLVDKMIDLPWDSEEEKHLHKSLFDSAHEMPMKPNGSLLVVYYLRVKCLDMLPEVQRENVKAINSGEQSQFARTAQLSSPAHVGKSQSPVMDLSTTFTTSLQNKSSLLRKNNALTDSGGLIRSSRSEFGRKVPSVLDTRASPHGPPTSNMRSSAGDMFPTVGQRVESPFLRGAKDISSRKGEEGFKKGIKYGDHDPVPMYLNLSSGDTPMKDYRTSLLKTAVNKTTIFQGKDSVGKGELHFGSRAEKPFILNGTGVGQNGLAKVSGYAGFREDYKVPTKENILSSSKRSSIDGAEASKGRGFFLNISTVITLM

SEQ ID NO: 82021 - protein, 266 aa, Zea mays
  Coding DNA Sequence Number=SeqID_40242
  Gene Ontology: Mol. function=metal ion binding; Cellular component =nucleus; Biological process=response to stimulus
  Homolog annotation: Hit_ID=Q5GA20; Match level="QueryCoverage=85%, HitCoverage=76%, E-value=1e-115, Identity=94%"; Hit description =Hypothetical protein adh1D
MSGSYFLGKTLDIISENPNFSKSEIPTPPPYNHDAISVRTHVLDIRRPCSHLPKISSKETHPKIAQVLLERQKYDMALLVLKCTGHGSFSATENFKKDDISSLSEAVTVVRVRIECRLLTEAFMYHRSYCSKVKEQHSADMTHAEDALKNSWVYHVEMMVTEFCAICIKRNLVDKMIDLPWDSEEEKHLHKSLFDSAHEMPMKPNGSLLVVYYLRRYRYLEAYEVDRSLQKFEQKILENTTEEIASKIRAIARWRESLVFCFITHV

SEQ ID NO: 82022 - protein, 90 aa, Zea mays
  Coding DNA Sequence Number=SeqID_40243
MALGELQAGVVWPLITDQRLVYLTPHMFPCHRSHSWIYGGDHFLVFAFVIDENGRSWLFSTKMGVVWPLIIDQRSHYWISGGDDFLVKIP

SEQ ID NO: 82023 - protein, 335 aa, Zea mays
  Coding DNA Sequence Number=SeqID_40244
  Homolog annotation: Hit_ID=UPI00004C1733; Match level="QueryCoverage =23%, HitCoverage=5%, E-value=2e-20, Identity=67%"; Hit description =UPI00004C1733 related cluster
MPDIPRDFAEHSLDIRAGARPVKQPLRRFDEEKRRAIGEKIHKLMAAGFIKEVLAFSVIENGRSWLFSTKMGVVWPLIIDQRLVHFNPHMFSCHRSHSWISGGDHFLVKNPLVLAFGIIENGRSWLFSTKMGVVWPFIIDQRLVHLTPHMFPCHRSHSWISGGDHFLVKNPNVLAFGTIENGRSWLFSTKMGVVWTLIIDQRLVNLTPHMFPCHRSHSLISGGDHFLVKNPYVLAFGIIENGHSWLFLTKMGVVWPFIIDQRLVNLTPHMFPCHRSHSLISGGDHLLVKNLNVLAFDTIENGRSWLFSTKMGVVCPLIFDQRLIHLTTHMFPCHR

SEQ ID NO: 82024 - protein, 119 aa, Zea mays
  Coding DNA Sequence Number=SeqID_40245
  Homolog annotation: Hit_ID=Q93X55; Match level="QueryCoverage=39%, HitCoverage=5%, E-value=1e-09, Identity=61%"; Hit description =Peroxin 6
MQDVGGLEDVKRILLDTILLPLTYNRMISSKLRKRLGVWVYGPPGTGKVGKDCLFLYDSNMAQCQTPEQQRQNHKKIMLSNTPTPFAMGSGDANIFHVLPVLLYSLQVLSTSTAVFARE

SEQ ID NO: 82025 - protein, 491 aa, Zea mays
  Coding DNA Sequence Number=SeqID_40246
  Homolog annotation: Hit_ID=Q93X55; Match level="QueryCoverage=9%, HitCoverage=5%, E-value=2e-08, Identity=63%"; Hit description =Peroxin 6
MTMSIEPALLKNHPNRMSLGEKGFCLNCSSWRGHHILHRSMSITAKQMEILSMSRVRNEEESSLWAMLIPPQGVSSESGMTLQGAMEVPVPSGPSRSKVQNEKPSLKQNEDCIGASIYSLAAGAAERRPAGAGQGLEACGLRLAGLDAHGEGVAAWRRRPARGGAGRLDWTRVLRAGGGRGKDAGARAAAGGQPRGAGHGDWRWPRPWEDARDPGCSLRRCSGSARRPTPTKPSTKNGTQLSPSPSVPPSVLRVSDDPSLDVGGLEDVKRILLDTILLPLTYNRMISSKLRKRLGVWVYGPPGTGKIPRDQELLMPGFNGMNTSGGCTEVFKDSPDPDRAPPPSRLPRPPLATAAVPPPTALRTPGARPGRRRGRLSRPQQRPPSSSRSLHPSSRLFLSLSIEQSSTPPSPSWRSRAGAPSHVGHNAVEQPRAQHPTCHRVMCGLLPPRGYGWGGDLPIGEDFFQMREKEKFEKEAERQKDQGNLEDKSQV

SEQ ID NO: 82026 - protein, 111 aa, Zea mays
  Coding DNA Sequence Number=SeqID_40247
  Gene Ontology: Mol. function=protein phosphatase type 2C activity
  Homolog annotation: Hit_ID=Q2HW33; Match level="QueryCoverage=90%, HitCoverage=39%, E-value=1e-12, Identity=35%"; Hit description =Protein phosphatase 2C-like
MYNKLWRSRRLDAVQSGCSALSIVKQGDPMVVANVGDSRGYYLADERRVHFVLQPNQESSVLGISHVFDDYYIEDHGVILTTQEVTQRRTDNNDQFVILATIGVAFVPTCL

SEQ ID NO: 82027 - protein, 53 aa, Zea mays
  Coding DNA Sequence Number=SeqID_40248
MTPSRRPAHRPPEAQPATSTKSHQYLVTQGRTDNNDQFVILATVGVAFVPTCL

SEQ ID NO: 82028 - protein, 120 aa, Zea mays
  Coding DNA Sequence Number=SeqID_40249
  Gene Ontology: Mol. function=transferase activity, transferring glycosyl groups
  Homolog annotation: Hit_ID=P31927; Match level="QueryCoverage=65%, HitCoverage=7%, E-value=6e-37, Identity=98%"; Hit description =Sucrose-phosphate synthase
MMKGREFRIFALRFSPSADASELCYEQLELEGIQRISARRKEQEQVRREATEDLAEDLSEGEKGDTIGELAPVETTKKKFQRNFSDLTVWSDDNKEKKLYIVLIRSTHLHIVLFYVVLNC

SEQ ID NO: 82029 - protein, 81 aa, Zea mays
  Coding DNA Sequence Number=SeqID_40250
MARAGISRVDDVEAAKSAESTRSEDHEESREDASQKPYSPSPGAGSRRRRVPETCSPDRRCTSAVGMKRTVRRLSCEERRK

SEQ ID NO: 82030 - protein, 69 aa, Zea mays
  Coding DNA Sequence Number=SeqID_40251
MARAGISRVDDVEAAKSAESTRSEDHEQSHEDASQKPYSPSPGAGSRRCTSAVGMKRTGRWLSCEERRK

SEQ ID NO: 82031 - protein, 205 aa, Zea mays
  Coding DNA Sequence Number=SeqID_40252
MTMSPLPVDGEVEAPESVGRSGSAFDTGASIDLMVVPRFLGRGGWASRALIASPFPLKACRLSVFHTSLRPVNLFYAFWALDGSRGLGPTSSFYRPRKRSASSGFLKKESSGGGTNDDTYQKLKEENERLKMSLTQLKGKCIAQPSQDNRDHMVKKLETGTTVACTTSLEENVKDLRIVKRKKQKMKFNASSKSLNHASIQSNTQ

SEQ ID NO: 82032 - protein, 205 aa, Zea mays
  Coding DNA Sequence Number=SeqID_40253
MTMSPLPVDGEVEAPESVGRSGSAFDTGASIDLMVVPRFLGRGGWASRALIASPFPLKACRLSVFHTSLRPVNLFYAFWALDGSRGLGPTSSFYRPRKRSASSGFLKKESSGGGTNDDTYQKLKEENERLKMSLTQLKGKCIAQPSQDNRDHMVKKLETGTTVACTTSLEENVKDLRIAKRKKQKMKFNASSKSLNHASIQSNTQ

SEQ ID NO: 82033 - protein, 252 aa, Zea mays
  Coding DNA Sequence Number=SeqID_40254
  Gene Ontology: Cellular component=membrane; Biological process =transport
  Homolog annotation: Hit_ID=Q9LHF3; Match level="QueryCoverage=89%, HitCoverage=37%, E-value=1e-40, Identity=40%"; Hit description =Arabidopsis thaliana genomic DNA, chromosome 3, P1 clone: MXP5
MTVIKAAGAEPCGDGGAYGARRRQSLRARYAYGFVFFATNLLAWFVRDYGARALRGLHHVPVCGAGDSKCFQSGGVLRNVKIFFWVMFATTFGTRKLHEARNSWHSGCWILKSLVYAMSIGIPFIIPNIFIQFYGEVARLGAGIFLLLQLISMLHFISWCNKRWMPDPGSNQCYFSLQVLKLELTMACHPYVILSGLFGLFLSTISYIASFVGIGVLYVLYVPNSSCAFNIFTITWTAILVTIMMAVSLHSK

SEQ ID NO: 82034 - protein, 275 aa, Zea mays
  Coding DNA Sequence Number=SeqID_40255
  Gene Ontology: Mol. function=protein binding; Cellular component =membrane; Biological process=transport
  Homolog annotation: Hit_ID=Q1SD20; Match level="QueryCoverage=94%, HitCoverage=58%, E-value=6e-59, Identity=45%"; Hit description=TMS membrane protein/tumour differentially expressed protein
  Pfam annotation: Domain name=Serinc; Domain location=2-275; Score= -218.5; E_value=1.7e-05; Accession=PF03348.6; Description=Serine incorporator (Serinc)
MSIGIPFIIPNIFIQFYGEVARLGAGIFLLLQLISMLHFISWCNKRWMPDPGSNQCYFSLQVLKLELTMACHPYVILSGLFGLFLSTISYIASFVGIGVLYVLYVPNSSCAFNIFTITWTAILVTIMMAVSLHSKVCDFSSFLFAEKVNEGLLSSGIMSSYIVFLCWSALHSEPQTGKCHSHMKIAQDGDSATIVSFIIAICSIVMATFSTGIDTKSFQFRNDKVQLDEDIPYSYEIFHIVFAMGAMYFAMLFISWELNHPTRKWSIDVGWASTW

SEQ ID NO: 82035 - protein, 178 aa, Zea mays
  Coding DNA Sequence Number=SeqID_40256
  Gene Ontology: Mol. function=serine carboxypeptidase activity; Biological process=proteolysis
  Homolog annotation: Hit_ID=Q6YYX5; Match level="QueryCoverage=49%, HitCoverage=18%, E-value=3e-28, Identity=67%"; Hit description =Putative retinoid-inducible serine caroboxypeptidase
MTRMIQEVDQLLKLGVNVTVYSGQVDLIWATKGTMDWVQKLKLDGLNSFLSSPRTPIYCNKEGQSGTQAFVKSYKNLNFYWILEAGHMGNGGAYGKGISSLFNFDSFFIDLLHFSVHLKRKRFKCFLHNVPLPVFMLMATMDRYLWTTLALRSRCWLTLRDLLPSNRRKQTRRWNGTT

SEQ ID NO: 82036 - protein, 384 aa, Zea mays
  Coding DNA Sequence Number=SeqID_40257
  Homolog annotation: Hit_ID=Q6YYX5; Match level="QueryCoverage=41%, HitCoverage=22%, E-value=3e-39, Identity=72%"; Hit description =Putative retinoid-inducible serine caroboxypeptidase
  Pfam annotation: Domain name=Peptidase_S10; Domain location=8-214; Score=-211.2; E_value=0.041; Accession=PF00450.12; Description =Serine carboxypeptidase
  Subcellular localization annotation: CTP_CleavageSite=39; ConfidenceScore=5.45e-01
MLLSRFVPNMLYALDACKMPSQVMDPRRHLSQFSNPTVVASSFSEEQFRLPTEVGRAVRRRVRCSGWRLHEAQDTGGGPAPQARRQCHRLQQTEAGQILEAGVAASHWWGEQSDDVFDALAGDFMKPRIQEVDQLLKLGVNVTVYSGQVDLIWATKGTMDWVQKLKLDGLNSFLSSPRTPIYCNKEGQSGTQAFVKSYKNLNFYWILEAGHMGNGGAYGKGISSLFNFDSFFIDLLHFSVHLKRKRFKCFLHNVPLPVFMLMATMDRCLATEVCLVWVDKGGAEGLLPGVIELGCGLLLDVEDNSVHAADGLKSVLHLEDVAAIGCGAAMPPVALPDKEAGYLGDYWRSIMAPDEAGAATSALDVAGGCLILAVAAAWGQRQSS

SEQ ID NO: 82037 - protein, 66 aa, Zea mays
  Coding DNA Sequence Number=SeqID_40258
MPPVALPDKEAGYLGDYRRSIMAPDEAGAATSALDVAGGLSDTGGGCCLGAAAELMIVETFDTRLM

SEQ ID NO: 82038 - protein, 179 aa, Zea mays
  Coding DNA Sequence Number=SeqID_40259
MAPDEAGAATSALDVAGGPPDAGGGCCLGAATELMIVETFDTRLVAACLGLAHGHCHMGPCASLTSLASRAMLESTCALLCWWVLGVGLRACSLLYRWDPFVGFISVLAMTPSRIGSDHGIRIASLCTNLDPPPLPSGVYCNGARRPPRTPRLEIALFHAYKGGAMTVAIVRRHDRAKR

SEQ ID NO: 82039 - protein, 48 aa, Zea mays
  Coding DNA Sequence Number=SeqID_40260
MAGGGKLAGAKEGRLASKGLQVLLTGSRDMEGEVGFVSLLSTERRSRV

SEQ ID NO: 82040 - protein, 103 aa, Zea mays
  Coding DNA Sequence Number=SeqID_40261
MCEPPSEASPEIKEDVCAWNLTVAHRIARSTRGRGQPKSGEDDLGSLVRFCRVREPGKLHGPLAKLTEAQAQLERGWSELATVAEARAVMAGGGKLAGAKEGR

SEQ ID NO: 82041 - protein, 273 aa, Zea mays
  Coding DNA Sequence Number=SeqID_40262
  Gene Ontology: Mol. function=protein binding; Cellular component =protein complex; Biological process=proteolysis
  Homolog annotation: Hit_ID=Q851Y6; Match level="QueryCoverage=81%, HitCoverage=50%, E-value=1e-113, Identity=95%"; Hit description =Putative proteasome regulatory non-ATPase subunit
MARLTGGEEGPTRGGAGGLVGGERSGLLTRWHRSIQWHRELHGEGDSTNLDAAIESLLNVEKQMRLAGDVAGTRKAVIDIVELCYKAGAWKTLNDQIVLLSKRRGQLKQAITAMVQKAMDYIDLTPDIDTRVELIKTLSSVSAGKIYVEIERARLIKRLANIKEEQGKIDEAADLMQEVAVETFGSMAKTEKIAFILEQVRLCLDRQDYVRAQILSRKISTRVFDADPSKEKKKPKEGDNIVQDAPADIPSLLELKRIYYELMIRYVMLLNLN

SEQ ID NO: 82042 - protein, 341 aa, Zea mays
  Coding DNA Sequence Number=SeqID_40263
  Gene Ontology: Mol. function=transferase activity; Cellular component= chloroplast thylakoid membrane; Biological process=metabolic process
  Homolog annotation: Hit_ID=Q6ZH91; Match level="QueryCoverage=91%, HitCoverage=65%, E-value=1e-120, Identity=50%"; Hit description =Putative pentatricopeptide (PPR) repeat-containing protein
  Pfam annotation: Domain name=PPR; Domain location=101-135; Score =21.7; E_value=0.0026; Accession=PF01535.11; Description=PPR repeat
  Pfam annotation: Domain name=PPR; Domain location=142-176; Score =48.2; E_value=2.7e-11; Accession=PF01535.11; Description=PPR repeat
  Pfam annotation: Domain name=PPR; Domain location=209-243; Score =40.8; E_value=4.6e-09; Accession=PF01535.11; Description=PPR repeat
  Pfam annotation: Domain name=PPR; Domain location=244-278; Score =14.1; E_value=0.16; Accession=PF01535.11; Description=PPR repeat
  Pfam annotation: Domain name=PPR; Domain location=286-320; Score =16.8; E_value=0.076; Accession=PF01535.11; Description=PPR repeat
  Pfam module annotation: Pfam domain module=PPR::PPR::PPR::PPR::PPR; Domain location=101-135::142-176::209-243::244-278::286-320
MTTSERRASRLLDGFLRSKEEVQGRAPIIAALLQLPPRRAPAAGPALLAAFLRCPGASPDVATLNTLIHGLSTASPRPSSPALLRLFRFLPEAYAFAPDAITYNSMLAALCRAGDLATARRLFDGMRAGEQGGEAGAFPNVVAYTTMIRACCASRLADEALSLFKMMLADGVRPNRITYNTMVQGFCQAGRMEPVKEVFGMDSFKRDTCTFNTLMAAHCREGRIQDAKKVFDQMMELRVRRDSASYSIVTRALCENGEFGRAEELVDSLLEKEVLKKRGGCVPLIASYNPVFKYFCENGKAKKARLLFGQLLDIRSKVDFLAFNTTGINLFAECRKHSAKP

SEQ ID NO: 82043 - protein, 678 aa, Zea mays
  Coding DNA Sequence Number=SeqID_40264
  Gene Ontology: Mol. function=transferase activity; Cellular component= chloroplast thylakoid membrane; Biological process=protein amino acid phosphorylation
  Homolog annotation: Hit_ID=Q6ZH91; Match level="QueryCoverage=77%, HitCoverage=83%, E-value=0.0, Identity=73%"; Hit description =Putative pentatricopeptide (PPR) repeat-containing protein
  Pfam annotation: Domain name=PPR; Domain location=290-324; Score =21.7; E_value=0.0026; Accession=PF01535.11; Description=PPR repeat
  Pfam annotation: Domain name=PPR; Domain location=331-365; Score =48.2; E_value=2.7e-11; Accession=PF01535.11; Description=PPR repeat
  Pfam annotation: Domain name=PPR; Domain location=398-432; Score =40.8; E_value=4.6e-09; Accession=PF01535.11; Description=PPR repeat
  Pfam annotation: Domain name=PPR; Domain location=433-467; Score =14.1; E_value=0.16; Accession=PF01535.11; Description=PPR repeat
  Pfam annotation: Domain name=PPR; Domain location=475-509; Score =16.1; E_value=0.092; Accession=PF01535.11; Description=PPR repeat
  Pfam annotation: Domain name=PPR; Domain location=510-544; Score =32.3; E_value=1.8e-06; Accession=PF01535.11; Description=PPR repeat
  Pfam annotation: Domain name=PPR; Domain location=545-579; Score =29.9; E_value=9e-06; Accession=PF01535.11; Description=PPR repeat
  Pfam annotation: Domain name=PPR; Domain location=581-615; Score =12.0; E_value=0.29; Accession=PF01535.11; Description=PPR repeat
  Pfam module annotation: Pfam domain module=PPR::PPR::PPR::PPR::PPR::PP R::PPR::PPR; Domain location=290-324::331-365::398-432::433-467::475 -509::510-544::545-579::581-615
MALGKEGNLGTDKAIFAECCCQGTRQRDWQRDPLEDSLSSAGPLDTRQRVLLCRVPTRALGTGTGGTAIYLKHLCLRAVTNDLGICFVGDKTIFFTWSATHTTKSRTPTRAFQNLTKFHSEQSKNKKTPFPCRPKWATGAPPETEPASTAAARKLHHLLRSRDLLPALSYLRTLPSPFTLLPNHALNALLRALAAAGRVRAAASLFRAIPAPTPHSFNSFLAALLRRGRRRAASALLAAFLRCPGASPDVATLNTLIHGLSTASPRPSSPALLRLFRFLPEAYAFAPDAITYNSMLAALCRAGDLATARRLFDGMRAGEQGGEAGAFPNVVAYTTMIRACCASRLADEALSLFKMMLADGVRPNRITYNTMVQGFCQAGRMELVKEVFGMDSFKPDTCTFNTLMAAHCREGRIQDAKKVFDQMMELRVRRDSASYSIVTRALCENGEFGRAEELVDSLLEKEVLKKRGGCVPLIASYNPVFKYLCENGKAKKARLLFGQLLDIRSKVDFLAFKTLILGHCKEGDFEEGYELVLSMLKRDLMPDSECYIAVIDGFMQKGRMKSAWEALHRMLNSGLRPSTSTFHSVLLGLLKKDGCAKEAADLIEIMLERKIRQNVDLSTNLIGVLFKSDLNDRAYKITKHLYDNGYYIKMEKLIATLCEGQEVHRCRGVFFVQLAEAP

SEQ ID NO: 82044 - protein, 810 aa, Zea mays
  Coding DNA Sequence Number=SeqID_40265
  Gene Ontology: Mol. function=helicase activity; Biological process =viral genome replication
  Homolog annotation: Hit_ID=Q1EPC6; Match level="QueryCoverage=99%, HitCoverage=54%, E-value=0.0, Identity=63%"; Hit description=DNA helicase homolog, putative
  Pfam annotation: Domain name=DUF889; Domain location=613-810; Score =319.0; E_value=8.1e-93; Accession=PF05970.5; Description=Eukaryotic protein of unknown function (DUF889)
MALVRKFGKPDIFLTMTCNPNWDEITRELLPMQSPQDRPDLVVRIFRAKLEELKKRLTKHDILGKIRAYVYVVEFQKRGLPHVHFLLIMQRKYKLTCPDQYDLLISAEMPDKKKYPELYKMVIKHMMHGPCGLLNPKCPCTKGRASCKNHYPRAFSNATSQGKDSYPIYRRRDDGHANKADGDVDEIKQYRDARWVTPPEALWRIFSFDLSQNSPPVMQLQLHLENMHMVSFHERAKVNHVVQRPGADRSMLTAYFEANRLHEEARGILYRDFPEWYTLQQGKVWQRRKRNTGGQVGRIVSAYPAEGERFYLRLLLNHVTGATSYADLRTVDGDTLPSFREAAQRRGLLEADNTIDECLNEAAIYQMPSALRRLFATILVYCEPNDVAELWQRHLDSMSEDYQRSTQSKTHVQQMVLIDIRNILQSMGKDIKTFPLPAIIDKYDDSHGTDREIYEEESIEPTAEDVAMKETLNEEQRSAYDKILSVVDTNNGGVFFVDGPGGTGKTYLYKALLAALRSQDKIAVATATSGVAASILPGGRTAHSRFKIPLTIDDGAVCSFTKQSGTAKLLQKASLIIWDEASMTKRQAIEALDNSMRDIMGRPELPFGGRTVVFGGDFRQVLPVVRKGSRAQIVAASLRSSYLWESMCHLKLVQNMRAQSDPWFAEYLLRVGGGTEEANNDGDVRLPDEVCVPYTGNDRDLDRLIDDIYPNLNENMSNTSYITSRAILSTRNDWVDMINMRMIDRFQGEQMMFHSFDTAVDDPNNYYPSEFLNTLTPNGLPPHVLKLKVGCPIMLLRNIDPANGLCNGTR

SEQ ID NO: 82045 - protein, 150 aa, Zea mays
  Coding DNA Sequence Number=SeqID_40266
  Homolog annotation: Hit_ID=O23755; Match level="QueryCoverage=50%, HitCoverage=8%, E-value=7e-17, Identity=67%"; Hit description =Elongation factor 2
MEIGGGAYLNLKPGRATADETLAVEQIRKEERGMPALAPFPFGNIACMKKGKSTLTDSLVAAAGIIAQEVAGDVRMTDTRADEAERGITIKSTEEKAGNPLKKSAQEIPAVLRPNRQAEAQTDMPHTGTQPHAPSPFSSGKLAAPAPPAA

SEQ ID NO: 82046 - protein, 123 aa, Zea mays
  Coding DNA Sequence Number=SeqID_40267
  Homolog annotation: Hit_ID=O23755; Match level="QueryCoverage=62%, HitCoverage=8%, E-value=7e-17, Identity=66%"; Hit description =Elongation factor 2
MEIGGGAYLNLKPGRATADETLAVEQIRKEERGMPALAPFPFGNVAWMKKGKSTLTDSLVAAAGIIAQEVAGDVRMTDTRADEAERGITIKSTEEKAGNPLKKSRPFYARTGTFGLEMKVRMV

SEQ ID NO: 82047 - protein, 110 aa, Zea mays
  Coding DNA Sequence Number=SeqID_40268
MNACKLLGPRSAWRVEAERRAGARDERVQAARSQVGLESGSRMTDGERRLGDGAQRLEMEIGGGAYLNLKPGRAMADETLAVEQIRKEERGMPALAPFPFGSWSMVRVCG

SEQ ID NO: 82048 - protein, 110 aa, Zea mays; identical to SEQ ID NO: 82047
  Coding DNA Sequence Number=SeqID_40269

SEQ ID NO: 82049 - protein, 602 aa, Zea mays
  Coding DNA Sequence Number=SeqID_40270
  Gene Ontology: Mol. function=cysteine-type peptidase activity; Biological process=proteolysis
  Homolog annotation: Hit_ID=Q53MK8; Match level="QueryCoverage=73%, HitCoverage=49%, E-value=1e-30, Identity=23%"; Hit description=Ulp1 protease family, C-terminal catalytic domain, putative
MKNVDRPPSNPKRIIIQSTQECFSVDIPRAPAGTVRPETRRAADEDDDFMPSSKKRNLDDSPGKVLKKVVTKRRKAVPPPRQQKLNVRCNPQDVLVSIQILNDRQQQAIARRGFSSILDMRLDALGSRSHLAWLMEKLDPNDMTIRAGPGKELKITKDTVHLILGLPNAGGGTALGIDEAVVANNLRAELGLSKEDFGVTALQDRLRKGSDDDLSIRCFFLILFNRLLFPTASWGITNHEVLLTEQMDRFHQIDWCQLIFNDLCQAAKKWHNRSVTNVSTTIYGCSIVILLYYLDHLHDSAAPLNKRGTPRIKYFDRNIIQALTRADKGKIRKGEEAFGHCSHKTRTNAFDVPRPDPSGQHSIHIELPLIRDLISSKLNQLPSRHRMGFIEKLSHFDAEVGKACSVIKQNLQQIVEKQFNLSDVFGELIDEVLRAEAGDNEDAYDVQKTTSKSDDHLPQTAEGCTCPAPPTVPDMSTPVSQVDTQFTDTQGKHGDGGKNMPTNTNVTPKATPHMDPDAPIFDATPQIKSTGGVQQVAETDLPDSGPCFDQTPSEHVYVETDPATNTPQVGQASLDSEMQTVLALREYLCGLQSDTGRYEVHT

SEQ ID NO: 82050 - protein, 155 aa, Zea mays
  Coding DNA Sequence Number=SeqID_40271
MEKKVKSHDTRQMFDDKLEPGFISIRTSIGSRLMLVSRFILFEPPTTPAACARGQGNSDHLRRRPAHRRDRRDLPDVTDHPAGALLPPNNHPKMFKPILLDSGNYELSDCNLADGEYILVPEQGAAQEVAPDPAPEPTPEDLPATALEGKPRFYA

SEQ ID NO: 82051 - protein, 258 aa, Zea mays
  Coding DNA Sequence Number=SeqID_40272
  Homolog annotation: Hit_ID=Q08068; Match level="QueryCoverage=15%, HitCoverage=65%, E-value=5e-14, Identity=94%"; Hit description=40S ribosomal protein S20
  Pfam annotation: Domain name=Ribosomal_S10; Domain location=197-256; Score=-24.0; E_value=0.0084; Accession=PF00338.12; Description =Ribosomal protein S10pS20e
  Subcellular localization annotation: CTP_CleavageSite=67; ConfidenceScore=5.45e-01
MPSAPAAACPAPATPPLCRLSARASHPPHKVHNRRPANPAPDCRKPRKPSRDQSAKSARLAVFPCAECNIVVGVDILLDKFAYLQRGSLEFPLPLMIDLPHGWVIVPHSPYKYTGCEQMLYVLLFLITQWTALMMLKSPPKTSRFLSRFQRTCTNLSLRQLVVDYNDWMCEPIFYARFDLLFAYAQAVVQCLSALFVLLDVCADLVKGAKDKHLRVKGPVRIPIKVLHITTHKSPCGEGFGRNPLSHICMTYLVTIWP

SEQ ID NO: 82052 - protein, 111 aa, Zea mays
  Coding DNA Sequence Number=SeqID_40273
  Gene Ontology: Mol. function=structural constituent of ribosome; Cellular component=ribonucleoprotein complex; Biological process =translation
  Homolog annotation: Hit_ID=Q08068; Match level="QueryCoverage=33%, HitCoverage=61%, E-value=4e-12, Identity=89%"; Hit description=40S ribosomal protein S20
  Pfam annotation: Domain name=Ribosomal_S10; Domain location=19-87; Score=-24.6; E_value=0.0095; Accession=PF00338.12; Description =Ribosomal protein S10pS20e
MDVRENHEDFCQVLENMYKIFSETVSRGLQLMDCADLVKGAKDKHLRVKGPARIPTKALHITTRVSPCDEEVDAIYLMIVWTDDPEVIMKLENYQSTLFGLFGMAENSPLY

SEQ ID NO: 82053 - protein, 93 aa, Zea mays
  Coding DNA Sequence Number=SeqID_40274
  Homolog annotation: Hit_ID=Q2R4L1; Match level="QueryCoverage=37%, HitCoverage=5%, E-value=8e-08, Identity=82%"; Hit description =Protein kinase domain containing protein, expressed
MKADAGVALYWLHPWLSSVACGSAKVIGTHADATTKVGWYCRTDSWSNGDWIGIGTRECGLWRRNLELDTWREQLAQQQQQQQQSLFVPSTLG

SEQ ID NO: 82054 - protein, 538 aa, Zea mays
  Coding DNA Sequence Number=SeqID_40275
  Gene Ontology: Mol. function=hydrolase activity; Cellular component =integral to membrane; Biological process=multicellular organismal development
  Homolog annotation: Hit_ID=Q10KM6; Match level="QueryCoverage=90%, HitCoverage=87%, E-value=1e-178, Identity=67%"; Hit description =GDA1/CD39 family protein, expressed
  Pfam annotation: Domain name=GDA1_CD39; Domain location=44-488; Score= 194.1; E_value=3.2e-55; Accession=PF01150.8; Description=GDA1CD39 (nucleoside phosphatase) family
MPDPTTKPPSPRPRRRRRLCGLCLGTALLALLVAALVHVVAPLPRAASASARFSVIIDGGSTGTRAHVFVTGHDGSPDLALSTVMRVSPGLSSFAADPARAGESLKPLIDFARDKIDGAGSAAGEAEVRLMATAGLRLLEERTQEAILASCRDVLRASGFRFEDAWAKVIPGSDEGIYAWVAANYALGRLGGDPNRTVGIIELGGASAQLAFVSDEVLPPKLSYNYTFIETTYTLYTNSFLNFGQNAAQDSFHEMLRSRGSSENATLADPCAPRGYSRNEEMMLRMSGASRSTLENQYVDNGTGNFTECISSSLLLLQKGKVVHIQQQQQQQQQQQSLFVPSTLGIVPHVSHINAEKCQYQQCHLGSTFVPELRGYFLATENFYFTSKFFGLKKSSSLSDFMFAGEQFCNQDLSTLRKKHPNRSDEDFSRYCFSMAYIVALLHDSLGVSLDDKRIEYSNQVGDIQVEWALGAFITLIQNASLKPLHTAVESTHSNRPLFAVLGMFLLCGVLFVSRWRKHKTKVIYDLEKGRYIITHIS

SEQ ID NO: 82055 - protein, 329 aa, Zea mays
  Coding DNA Sequence Number=SeqID_40276
  Gene Ontology: Mol. function=hydrolase activity; Cellular component =integral to membrane; Biological process=G-protein coupled receptor protein signaling pathway
  Homolog annotation: Hit_ID=Q10KM6; Match level="QueryCoverage=99%, HitCoverage=57%, E-value=1e-106, Identity=62%"; Hit description =GDA1/CD39 family protein, expressed
LAFVSDEVLPPKLSYNYTFIETTYTLYTNSFLNFGQNAAQDSFHEMLRSRGSSENATLADPCAPRGYSRNEEMMLRMSGASRSTLENQYVDNGTGNFTECISSSLLLLQKGKVVHIQQQQQQQQQQQSLFVPSTLGIVPHVSHINAEKCQYQQCHLGSTFVPELRGYFLATENFYFTSKFFGLKKSSSLSDFMFAGEQFCNQDLSTLRKKHPNRSDEDFSRYCFSMAYIVALLHDSLGVSLDDKRIEYSNQVGDIQVEWALGAFITLIQNASLKPLHTAVESTHSNRPLFAVLGMFLLCGVLFVSRWRKHKTKVIYDLEKGRYIITHIS

SEQ ID NO: 82056 - protein, 257 aa, Zea mays
  Coding DNA Sequence Number=SeqID_40277
  Gene Ontology: Mol. function=hydrolase activity
  Homolog annotation: Hit_ID=Q10KM6; Match level="QueryCoverage=98%, HitCoverage=43%, E-value=7e-75, Identity=60%"; Hit description =GDA1/CD39 family protein, expressed
MMLRMSGASRSTLENQYVDNGTGNFTECISSSLLLLQKGKVVHIQQQQQQQQQQQSLFVPSTLGIVPHVSHINAEKCQYQQCHLGSTFVPELRGYFLATENFYFTSKFFGLKKSSSLSDFMFAGEQFCNQDLSTLRKKHPNRSDEDFSRYCFSMAYIVALLHDSLGVSLDDKRIEYSNQVGDIQVEWALGAFITLIQNASLKPLHTAVESTHSNRPLFAVLGMFLLCGVLFVSRWRKHKTKVIYDLEKGRYIITHIS

SEQ ID NO: 82057 - protein, 188 aa, Zea mays
  Coding DNA Sequence Number=SeqID_40278
MAWADQADPTATARPSARVPARAVASVKYHYIPLQTGPQLHSHKNELPPHQKGCKITNSKRLTGDHCTSSDNDLRLGRLDSSSDCPRANATVKRPSPPSPHGRREQAIKAKEPEATTSAVGSLTYGGHHLSTNDSGHLRTNAAPANGGRPSAHKEVLAPVLATGVRTRPSRNANTAPAAYDVLYDPPV

SEQ ID NO: 82058 - protein, 585 aa, Zea mays
  Coding DNA Sequence Number=SeqID_40279
  Homolog annotation: Hit_ID=Q6QP51; Match level="QueryCoverage=39%, HitCoverage=98%, E-value=1e-17, Identity=40%"; Hit description =Putative growth-regulating factor 1
MTFVPFDYIDSGILKTTRETSNGKADQAKGLLRLRDTDTLLITFRERANTTVKRPSPPFPHRGREQAIKAKEPEVRPQVALTVSSAEATTSTVGSLTYGGHHLSTDDSGHLRTNATPANGGRPSAHKEVLAPVLAMRVRTRSSRNADIAPAAYDVLYDPPVWPAAWDGPWTWPTCARRDRRPCGGRTATPRPGSRWQFASSAKLVNTLLPLMLEEEAGRQPMRKAGPQLGLPSPLAQMMNILEAEGRGRPQPGSLFSTTRLTQEEGNTGAPHLEARKMERRDECEKSKGMATAREIDPFLKTDLPTRAPKHHGQSLPQRAPGFPPYDTVARSHMDREKGHFEGALRSKRNGPQALLLIKGSKVAPRGVRRPPQSTRAPSPLLIRGSKAGSSKGFDSRPRTCRVRDDPGYIRYMAKARATLPRYPKTFPRPAGMVCNGIPPKGGTEPSDPIEWVRVQQITYRDHLTPYPDTRASVGKPRAQQGAPPRPTRGLGLSLGLGRRSLPRPTPGLDLSLGLRRRSPPRPTPGLGLSLGLRRRSPPRPTSASASGGVTTSPDLSLGLRRSHRLARPRPRTDYATGDTSLPYL

SEQ ID NO: 82059 - protein, 136 aa, Zea mays
  Coding DNA Sequence Number=SeqID_40280
  Gene Ontology: Mol. function=transcription factor binding; Cellular component=intracellular; Biological process=regulation of transcription, DNA-dependent
  Homolog annotation: Hit_ID=Q3S835; Match level="QueryCoverage=55%, HitCoverage=41%, E-value=4e-31, Identity=80%"; Hit description=RAB7
  Pfam annotation: Domain name=Ras; Domain location=1-71; Score=-70.4; E_value=0.00053; Accession=PF00071.12; Description=Ras family
MQAGPSDPQRFLFILVGNKIDLDGGSKRMVPEKKAREWCASKGDIPYFETSAKEVHNVDTAFLCIARLALEHEHDQDMKAGEWCASKGDIPYFETSAKEDHNVDTAFLCMARLALEHEHDQDMLPNPGHSQIDLQF

SEQ ID NO: 82060 - protein, 273 aa, Zea mays
  Coding DNA Sequence Number=SeqID_40281
  Homolog annotation: Hit_ID=Q3S835; Match level="QueryCoverage=27%, HitCoverage=41%, E-value=1e-30, Identity=80%"; Hit description=RAB7
  Pfam annotation: Domain name=Ras; Domain location=1-71; Score=-70.4; E_value=0.00053; Accession=PF00071.12; Description=Ras family
MQAGPSDPQRFLFILVGNKIDLDGGSKRMVPEKKAREWCASKGDIPYFETSAKEVHNVDTAFLCIARLALEHEHDQDMKAGEWCASKGDIPYFETSAKEDHNVDTAFLCMARLALEHEHDQDITHNSSSVLRTLPRSAPARNAETLPFGFSVLVLAPAHPRTSRMSSGGGGGQQFRYTQTPSKVLHLRNLPWECAEEELVELCKPFGRIVNTKSGVGANHNQAFVEFVFSAFGYVHKIATFEKAAGFQALIQYTDAATASAAKESLDGRSIPR

SEQ ID NO: 82061 - protein, 305 aa, Zea mays
  Coding DNA Sequence Number=SeqID_40282
  Homolog annotation: Hit_ID=Q10KN7; Match level="QueryCoverage=42%, HitCoverage=93%, E-value=4e-35, Identity=73%"; Hit description =Polypyrimidine tract-binding protein, putative, expressed
  Pfam annotation: Domain name=Ras; Domain location=1-71; Score=-70.4; E_value=0.00053; Accession=PF00071.12; Description=Ras family
MQAGPSDPQRFLFILVGNKIDLDGGSKRMVPEKKAREWCASKGDIPYFETSAKEVHNVDTAFLCIARLALEHEHDQDMKAGEWCASKGDIPYFETSAKEDHNVDTAFLCMARLALEHEHDQDITHNSSSVLRTLPRSAPARNAETLPFGFSVLVLAPAHPRTSRMSSGGGGGQQFRYTQTPSKVLHLRNLPWECAEEELVELCKPFGRIVNTKSGVGANHNQAFVEFVFSAFGYVHKIATFEKAAGFQALIQYTDAATASAAKESLDGRSIPSYLLPEHVTSCCLRISFSAHKDLNIKFQSNRSR

SEQ ID NO: 82062 - protein, 224 aa, Zea mays
  Coding DNA Sequence Number=SeqID_40283
  Homolog annotation: Hit_ID=Q10KN7; Match level="QueryCoverage=21%, HitCoverage=15%, E-value=1e-16, Identity=89%"; Hit description =Polypyrimidine tract-binding protein, putative, expressed
MVGDGVFSAFGYVHKIATYEKAAGFQALIQYTDAATASAARESLDGRSIPRLSLACSWIQQAVQKVDLFGNLWIYASVTRSTHPQASVVQAEMPADVHREAREGVLEFERAFRERFSAYTLAAKRHIDSTTIFDVQGVIWILSSTSFLFLLMQALKRIKLYELKHKDISKVEKDIVLSSMSIVMLGIFVLHTPFAKAISGAALHLFSFVEAISIGRPPRNSSRS

SEQ ID NO: 82063 - protein, 106 aa, Zea mays
  Coding DNA Sequence Number=SeqID_40284
MGANRTPRMGSGPLCVWSGLLTAGSQDSGTKNTQTLIKARQGSGADTCPDHTVYASAPRSGGAPMLPCGMVHVTRCAASALNETCPFRGQAATSPFRRRRACPFHW

SEQ ID NO: 82064 - protein, 241 aa, Zea mays
  Coding DNA Sequence Number=SeqID_40285
MARPSLGRLLWVHSSARLNYMGRSGAATCPEKVIYSKASTVGQDPHGRASDPWICGPDLQGGDLSIPLAGGDLSIPQAACLSIPLAGGMPHTVACTTLIITRTLPRKQPPHINTARIVDIMAPGDCTGVLALVTPIVYSFCYVPGPTCRGSASLYVPPLSYKREGTQRLQDRHSDSQTHSQALKHIQYTYTVEIVEHHGLTSEDFVMEEEAASSMPRSSNHPAPSAAAVCAAQQHTPAHTS

SEQ ID NO: 82065 - protein, 88 aa, Zea mays
  Coding DNA Sequence Number=SeqID_40286
MGKNNKRKREPTPPSEEFGDSEYSEEEFSSESEGSPAPIPLRESSDDSDDSQGLAAEVWTYIRAVERSGLEGSDDDCNTLNLGIYPSV

SEQ ID NO: 82066 - protein, 151 aa, Zea mays
  Coding DNA Sequence Number=SeqID_40287
MGKSKKGGSSSHHSGDKRKREPSPPSDDFGDSEYSEEEFSSESKGSPAYTSPRCRPMTRTILRGSSSSCGRTSGPSSALGSRARMSQRSSRMRRIPPTRPSRGAVMMAMTRAMAATRATVTAARVTATTARATAAAARTMVVAAGPVAKRH

SEQ ID NO: 82067 - protein, 291 aa, Zea mays
  Coding DNA Sequence Number=SeqID_40288
MGVGVQTKHEFLPTEPILRFSQRTCPILYFRSKTHVWGGFALYRCRTSPIPKTGVGVHTKHEFLPPEPFLRFSQRTCPIHYFRSKTHVWDGFAQFRCHTSHIPKTGVGVHTKHEFSPPEPIIRFSQRTCPMHYFRSKTHVWGGFALYRCRTSPIPKTGVGVHTKHEFLPPEPFLRFSQRICSILYFRSKTHVWGRFTLYRCRTSPIPKTGVGVHTKHEFLPPEPFLRFSQRTCPIHYFMSKTHVWGGFTHFRCHTSHIPKTGVGVHTKHDFSPPEPIIRFSQRTCPMHYFR

SEQ ID NO: 82068 - protein, 93 aa, Zea mays
  Coding DNA Sequence Number=SeqID_40289
MGDVRQRNDLRDQADLASARSVTTGSWFSDCIGALGLARRSRIARVNFRQIGNISTRRKIGHLSYIIPVAKTRALYAPRHPFWERVTYDNEIA

SEQ ID NO: 82069 - protein, 89 aa, Zea mays
  Coding DNA Sequence Number=SeqID_40290
MSFGRKVVDWAEIVPVAKTRALYAPRHQFLEWVTCGNKIASDEDITMSTTTPAAPPHQAPLPSLAGPITRARARDLNFVMLLKNEGPEE

SEQ ID NO: 82070 - protein, 494 aa, Zea mays
  Coding DNA Sequence Number=SeqID_40291
MGVGVQTKHEFLPTEPILRFSQRTCPILYFRSKTHVWGGFALYRCRTSPIPKTGVGVHTKHEFLPPEPFLRFSQRTCPIHYFRSKTHVWGGFAQFRCHTSHIPKTGVGVHTKHEFSPPEPIIRFSQRTCPMHYFRSKTHVWGGFALYRCRTSPIPKTGVGVHTKHEFLPPEPFLRFSQRICSILYFRSKTHVWGRFTLYRCRTSPIPKTGVGVHTKHEFLPPEPFLRFSQRTCPIHYFMSKTHVWGGFTHFRCHTSHIPKTGVGVHTKHDFSPPEPIIRFSQRTCPMHYFRSKTHVWGGFALYRCRTSPIPKTGVGVKTHVWGGFAQFRCRTSHIPKTGVGVHTKHEFLPPEPILRFSQRTCPIRYFRSKTHVWGGFALYRCRTSPIPKTGVGVHTKHEFLPPEPILRFSQRTCPIHYVRSETHVWGGFAQFRCHTSPIPETGVRSKTHVWGGFALYCCRTSPIPKTGVGVHTKHEFLPLEPFLRFSQRTSPIH

SEQ ID NO: 82071 - protein, 153 aa, Zea mays
  Coding DNA Sequence Number=SeqID_40292
MVIRRDDHQPRGGEKQAGLRPLPRPQLQGCSSSGLGRRAHRVGAASAWASDPLLPPAFGGEGHPPAVRRRRPPAMRGKVNCCCLARVQLSVLYPGDGRAVRRWLLSPMLKRRLPLERLPTAAVVASADETVSATYARGLRLFGFNGWFSSPVR

SEQ ID NO: 82072 - protein, 202 aa, Zea mays
  Coding DNA Sequence Number=SeqID_40293
MPHNIYKEGLRSDTSCDGTSQKQQKSATSSPKNNEGINPEYGILSKSYPTKEKTLKGMLVIWESSKAKHQKAFIKQVIKEGNQIQGRKGKGLNRTGPDSAQRPREERRPRAAAPWRLCKKGPEFLTNCERVPSLFLCVADRSQKGPCTSTNSQLEVHDAVQARPCSGEHLRRPIEAKTGAKLRPRPNPSPHECFPQLNLAHD

SEQ ID NO: 82073 - protein, 237 aa, Zea mays
  Coding DNA Sequence Number=SeqID_40294
  Subcellular localization annotation: CTP_CleavageSite=48; ConfidenceScore=5.04e-01
MEAMASSAAAVRGRRSRGTAPWERRSRAPCYSRGKKGSAAMGGREFLRAEQRKELCKQQKSATSSPKNNEGINPEYGILSKSYPTKEKTLKGMLVIWESSKAKHQKAFIKQVIKEGNQIQGRKGKGLNRTGPDSAQRPREERRPRAAAPWRLCKKGPEFLTNCERVPSLFLCVADRSQKGPCTSTNSQLEVHDAVQARPCSGEHLRRPIEAKTGAKLRPRPNPSPHECFPQLNLAHD

SEQ ID NO: 82074 - protein, 120 aa, Zea mays
  Coding DNA Sequence Number=SeqID_40295
MEIVARRQGTRWRDGDQGKTHGHGSRRENRGASDLLFHERWSLGEGEPRRCAGKKGAMAGASGFIPEQGVGQGKLLPTGSERQGGGRHGGRGEELSSLRLLLAGGRKKAREKGKWRLKKR

SEQ ID NO: 82075 - protein, 77 aa, Zea mays
  Coding DNA Sequence Number=SeqID_40296
MGEELARASRHGCWPELELELGQQQRGSALEVAGSWKSLLVGRGRAGEMATRGKLTAMEVAGKTGAQVTCCSMSAGA

SEQ ID NO: 82076 - protein, 100 aa, Zea mays
  Coding DNA Sequence Number=SeqID_40297
  Homolog annotation: Hit_ID=Q1SE31; Match level="QueryCoverage=73%, HitCoverage=4%, E-value=2e-15, Identity=56%"; Hit description =Transcription factor jumonji, jmjC; Transcription factor jumonji, JmjN; Zinc finger, C2H2-type
  Pfam annotation: Domain name=JmjC; Domain location=1-70; Score=-24.7; E_value=0.099; Accession=PF02373.13; Description=JmjC domain
VVLLIHAASLVVLGEKTTLMSPDVLVARGVPRCRLLQYPREFVVTFPRAYHIGFSHEVIADSSINLAFRVGISNGGVDMTTDTEHPPTIDNYQTSNNGSE

SEQ ID NO: 82077 - protein, 281 aa, Zea mays
  Coding DNA Sequence Number=SeqID_40298
  Homolog annotation: Hit_ID=Q6BDA0; Match level="QueryCoverage=26%, HitCoverage=7%, E-value=6e-16, Identity=63%"; Hit description=Early flowering 6
  Pfam annotation: Domain name=JmjC; Domain location=130-226; Score =1.7; E_value=0.00047; Accession=PF02373.13; Description=JmjC domain
MATVGDCKEKAAGDEDSTEKLAVQLTGIYLFSTILYEPNEGVHNYTVPPPPSTTRVMPLPTLYRNLRRRPHLGQLFPGPFKAMRAYLCAEGNMEDTVRQVNSTPVLFTLTWHLLLRHTCIFISFQAEGSMDICFPIGTKLFIHYTKPVNFLSHWGTQDMVVLLIHAASLVVLGEKTTLMSPDVLVARGVPRCRLLQYPREFVVTFPRAYHIGFSHGISNGGVDMTTDTEHPPTIDNYQTSNNGSEWYASHIYDAWARASKALDALELESFGSADIYLAYCS

SEQ ID NO: 82078 - protein, 129 aa, Zea mays
  Coding DNA Sequence Number=SeqID_40299
MATVGDCKEKAAGDEDSTEKLAVQLTGIYLFSTILYEPNEGVHNYTVPPPPSTTRVMPLPTLYRNLRRRPHLGQLFPGPFKAMRAYLCAEGNMEDTVRQVGWQVAPVASSPLRGLGTRGGHCTWDFENL

SEQ ID NO: 82079 - protein, 131 aa, Zea mays
  Coding DNA Sequence Number=SeqID_40300
MPESSLAVSPAREIDADGSKNTRATPLRAPTMAAAGECKEKAAGDEDSAEKLAVVLPARNSLWVRTGSLAVDNCFTSCKAKGASNCNQWQKMDLGVYLGAKGDDADLLPRQVDVGRRFLHVHAKISDADML

SEQ ID NO: 82080 - protein, 171 aa, Zea mays
  Coding DNA Sequence Number=SeqID_40301
MAGGGGLNRSSSRGQLPPSNLLVAEDDAFNRNRRECARAAYQLPYPGSESKADAVYRMYSSPSSASSRFNPLTRSYCQVHKKFYKAIQSMGRTLKCPEEECSIGTRILLLDQDFPRHLMMHFVCSLLPNLCKDTKQLMKRCILSSDAFLEDSCAEGQELVYMLGFREFLLR

SEQ ID NO: 82081 - protein, 633 aa, Zea mays
  Coding DNA Sequence Number=SeqID_40302
  Gene Ontology: Mol. function=5-formyltetrahydrofolate transporter activity; Cellular component=membrane
  Homolog annotation: Hit_ID=Q5SMV1; Match level="QueryCoverage=78%, HitCoverage=91%, E-value=1e-143, Identity=54%"; Hit description =Integral membrane transporter-like protein
  Pfam annotation: Domain name=BT1; Domain location=158-570; Score =359.4; E_value=5.7e-105; Accession=PF03092.7; Description=BT1 family
  Pfam annotation: Domain name=MFS_1; Domain location=151-523; Score =21.3; E_value=3.4e-05; Accession=PF07690.6; Description=Major Facilitator Superfamily
  Pfam module annotation: Pfam domain module=BT1::MFS_1; Domain location=158-570::151-523
MHGSTERGSVAAHLAGAEDGLAGERLGATGLASTKGVESGARHGRHLGRERAARHGRKGRRDLPSGRSGLGRGKSTCLPLLAGRRNSRVGAKRLREKPPRSCVWFSFRLLAARISPEAEPNRGVVSRFPAGGWGGCPASCTGPSCSRSPPSTVYGACQGVGNAIGGVAAGYYWKDVQRVQPSVAQFYQGVTDAPWIVKPIWGLLTDVVPVAGFRRRPYFVLAGVIGVSSMLMFSLNHELGIMPALLMLTAQSAGAAVGDVTVDALVAQNSITHPPLAADMQSLCGFSSSIGALLGFSLSGLLVHSMGSQGALGLLSIPSALVLLAGILLKENRGTEFDYMQVHKKFYKAIQSMGRTLKCPQVWRPCAYIFVSLNLSLDIQGGMFYWYTDPVVGPGFSEGYIGLIYSIGSVGSLIGVLLYQSTLKDYTFRSMLLWGQVLSSLAGMLDLVLVTRLNLKIGMPDYFFAVADNTVSQMVGRLQWLPLLVLCSKLCPPGTEGTLYALLMSLQNAGLLMSAWWGGLLLHMLNVTRLEFSNLWIAVLIRNISRFVPLMLLFLVPDCDQNSALLPAEMLHGSESTETMEKGSNEFSVLVGDDCGCISPDVTVDNEQIKMFDAEIDDVELIPLVNKSGLTIS

SEQ ID NO: 82082 - protein, 155 aa, Zea mays
  Coding DNA Sequence Number=SeqID_40303
MGVLPKVTTSKLKLNYRRTPLLKGVSIVVKEKLKIIMPEVGLSGCKIAVDKDWLAGDKDVAVARLSQASIGSFAPPVGRNTSIHMTIRPVTVDRRADRGPFNWSHASSWHTLESLFLSRVRKRQIFVAFAPRWYQMRKNKTEVREDLVLHIGSFA

SEQ ID NO: 82083 - protein, 247 aa, Zea mays
  Coding DNA Sequence Number=SeqID_40304
MVTKCFIEYEDASSQRKLHGVWRRFVFNEKCFDVNEKKGRNPKVFRTFGTCFSLTVFGTTILQIDKVQPPKLLRKRFYPISLSKALGISSAEGAISSEVTTSKLKLNYRRTTLLKGVSIVVKEKLKIIMPEVGLSGCKIAVDKDWLAGDKDVAVARLSQASIGSFAPPVGRNTSIHMTIRPVTVDRRADRGPFNWSHASSWHTLESLFLSRVRKRQIFVAFAPRWYQMRKNKTEVWEDLVLHIGSFA

SEQ ID NO: 82084 - protein, 120 aa, Zea mays
  Coding DNA Sequence Number=SeqID_40305
MEAKSHHQPNQGGTCKNYATSKAEYTNTQLDLPGYNGSSSLISCEKQTIRIEFYPCKVNLNTRHVRALRPHTRQPSPSIPRSQPGLTALAYNAPLTPTAVVQWPHLYPPYLEWETQSQVA

SEQ ID NO: 82085 - protein, 276 aa, Zea mays
  Coding DNA Sequence Number=SeqID_40306
MAVEFNPRAQRASRGAKEFTRARNQRKTHRGARSTYTGGRVKSGDIDPVSPARYALVLKIGGRQIGSVGTVHPKTKWMSNHAKWSWLLFKFFQGVPKYNGSSSLISCEKQTIRIEFYPCKVNLNTRHVGALRPHRFPGNRKGLTALAYNASLTPTGRRAVTALVPTITGMGDHVSGRVRRAIIGQVHSGTRLTDLPYFSVTTSKLKLNYRRTTLLKGVSIVVKEKLKIITPEVGLSGYLSLKIQTDSGLIATSRPSSCMICCLFVTIPYSKVVAGM

SEQ ID NO: 82086 - protein, 141 aa, Zea mays
  Coding DNA Sequence Number=SeqID_40307
MEKVFIVLWHEIPARQQQLTSGEHKNHVQRERKKREKRLNLRSGLAVIVPGVSLRDSVYLLLKKSWCCHLMLNIVEPVIKLCWVRYICYAGTYFCDSNDYVYRNVNGYGYPMGTRYPWWVWVWRNFVPMMGSGYEYGSNFS

SEQ ID NO: 82087 - protein, 147 aa, Zea mays
  Coding DNA Sequence Number=SeqID_40308
MAHRTVRCTPDMSGAPATSSVPLESDRWSSDLWATLDVRWRTGQLLFIVRCASMGKPDVCARCGAFNASAGIILPFNVEYVEPVIKLCWVRYICYAGTYFCDSNDHVYRNVNGYGYPMGTRYPWWVWVWRNFIPMMGSGYGYGSIFS

SEQ ID NO: 82088 - protein, 139 aa, Zea mays
  Coding DNA Sequence Number=SeqID_40309
MVVAPWARYLRQEYVPVLTWAASTYRSPSCPYFRENNGRSRRFSLGLGRAHRAAARRVGLALGRCDGAVGSAGRPSAAGGKVNRQGLPHRTNSHPHSLNGGPQSPRRSRRYDLRDILLKAFVRSSLNPRGDNASADEGH

SEQ ID NO: 82089 - protein, 456 aa, Zea mays
  Coding DNA Sequence Number=SeqID_40310
MNEHRHSRCHYKRNSGSTPAGTNNPHIRGPAGRQNPWWLADARSGSSDNDLRSEWPNSSSDDLRADAAATSSSPTSPLEGRGQAIKAKEPKARSADGGGDLVGNEDFFSRHHLNVDDDSHPPTGRSPLGSSRTGVHRPPCKRRRTGAKAGQPKNTNAALAARDVLGGPLVRAARRPLVRREGTPGAEPEPAEPERVTHEPMREVELRLSPPSTPARMMKILEAEGGAEAAARFPSPHHQAGGHRLGTEEAKPPRVERVTAQRLQAFLHFRLDQRVKSRTAVQTACHCTKGTQPFDFDASSLEVQAHTSCNRRADYYVQETAPPLALVSRLLDCGTGAATRGDPAHDPTVPTEHIGHGSVNRGRRRDGRYGQKWADSNGGGRRAEAAVKSSASSCPLLGQRENPLRRREDDAPVFRSSNGSRTHNGCPANHSSHRINSAAGQAAPLAGKADDASPPP

SEQ ID NO: 82090 - protein, 380 aa, Zea mays
  Coding DNA Sequence Number=SeqID_40311
  Homolog annotation: Hit_ID=Q6QP51; Match level="QueryCoverage=62%, HitCoverage=90%, E-value=5e-17, Identity=33%"; Hit description =Putative growth-regulating factor 1
MAKCGPAVMAVAGGRKQQSNRLQAHDRRHLWQAKRAMLHLRHNDRVKKGTGKGDTSKGILLREGSGPRAHLLIRGLKAGPSEGFDSRLKALGLRAHYWSEGFVGWPPDGFDSRPRAHRVRDDSGYVRYITKARATLPRGLGAALANPASAKPLTASTYQPENPEPDYAPGQRPENSAACAASTAAPPARVRLTATKSSLGRHRNLCLARPQGSDSTSPRTTISASPDPRDRTQPQLRKTVSASPDPGLGLDLDSGRRSPPRPTPGLGLDLDSRRRSPPRPTPGLGLSLDLGGVTTSLRPTTPQREAIITLSLASLGYREQDRRPIWLAPVKQVMTAPRVLHDNGGSQPPTEARIRQQGSDSPDSCASTGLKRSSDGHDAT

SEQ ID NO: 82091 - protein, 170 aa, Zea mays
  Coding DNA Sequence Number=SeqID_40312
MARVACTLPATGLSEVRWTRTTVGGPNDLGGSVTAGIGAKPISSDIMKHFKKNFQILIQENLFHSYLATFWKYSSCKTRKTARKSTGPIGVPRHQLAPRHEESSSGSNDPIGDLETQVEQLRMELHHRNRVWANDSQRIAKLSAEVGRLQFELLERDSAIDWAIYSRSIA

SEQ ID NO: 82092 - protein, 165 aa, Zea mays
  Coding DNA Sequence Number=SeqID_40313
MARVACTLRGKRLDGGVSVLSVGVNLFCFRLFVPSMCCNIYVTGETLLGKFELSERDSAIDWAINLRSIAWHREAKARARVDELSTTLDNLQLYCNTLHEEVHVLYGRLHLDVPADPVGMGAGPSGTAGEGPDGELDLFKPPPSMNLADERSPAADSEATKDNED

SEQ ID NO: 82093 - protein, 501 aa, Zea mays
  Coding DNA Sequence Number=SeqID_40314
  Homolog annotation: Hit_ID=Q6QP51; Match level="QueryCoverage=40%, HitCoverage=99%, E-value=1e-105, Identity=87%"; Hit description =Putative growth-regulating factor 1
MTEEHQPPRGRAPPTATRRRQHGCTPSGGPEGGRAQCMRGVQRHVHCPGDRYLFKGGSPHLHSKRHEQSLHRRAPGFPPSDAGAGSHTSCGLTRNGRSQTTTHEAGNHLTVISVPPFSPKPAGERAERHAGGVQPHHGCAPFRLHRARWVSVKAWARMSCNRRNGYCVQGNRTATRPMPRLLDCGTSAATRGIPAHNPTVPIGHNDHGSVSREGRHDGRYGQKWADSNCSSRRAEAAVKSPAGSHPLLKRQESPLPRHEDDAPMFRSSNDSSTRNAKRHLWQAKRTSFRLCHNGRVKKAAPEHSGSKLITDQGFEGWPLGRVRQPPQSTQAPRPLLIRGSKAGPPEGFDSRPRACRVRDDSGYVRYMAEARAALPSHFALPLTDLTGKQRLSPRSDCCASHPGKADNSKFSLGRNRKLRLARPSASASGTTGSSASPDLRHRPREEVSASPDPKTRPQPRPRKESRPRPNLASASGEVSASPDLGLGPTAPQGIHHYPTPS

SEQ ID NO: 82094 - protein, 74 aa, Zea mays
  Coding DNA Sequence Number=SeqID_40315
MRGKANCCCLTRVQLSVLHPGDGFETALDEAVKNCKALAEAAEQKEAERVAMSEAISAFCQAFGLDGVPSGSSP

SEQ ID NO: 82095 - protein, 74 aa, Zea mays
  Coding DNA Sequence Number=SeqID_40316
MSDIDHALEEILLEDLLLEPPETESSVVRTEVLDDVPLAVREAPTCGDSSQIGRILKREKTVVFKLIIGSLERG

SEQ ID NO: 82096 - protein, 90 aa, Zea mays
  Coding DNA Sequence Number=SeqID_40317
MEKSWLCTAKTSSSLVHRTVSGAPGLLDGELAALGNRTCDVAKIHRTIRWCTGLSEREAPTCGDSSQMGRILKREKTMVFKLIIGSLERG

SEQ ID NO: 82097 - protein, 104 aa, Zea mays
  Coding DNA Sequence Number=SeqID_40318
MQVACNRTVGAHPFGFVASSMEAQAHTSCNRRAGYYVQETAPPLAPMPRLLDCETGAATRGNPAHGPTVPIEHNDHGDRERGYFERDPSPRRKRAPSPSTDQGF

SEQ ID NO: 82098 - protein, 433 aa, Zea mays
  Coding DNA Sequence Number=SeqID_40319
  Homolog annotation: Hit_ID=Q6QP54; Match level="QueryCoverage=19%, HitCoverage=32%, E-value=5e-17, Identity=57%"; Hit description =Putative kinase
MQAACNCTAGMHPFDFDASSMEAQAHTSCQSAAGEGAMVEMAKSGLAVMAVAGGRKQQSNRLQAHVPSWSSRGALSHGTGKGDTPKGILLREGSGPRALLLIRGSKAGPLEGFDSHPRALGPRALLLIRGSKAGPSEGFDSRLRALGLTPTTDQRFEGWPLGRVRQPPQGTRAPRPLLIRGSKVGPLKGSTAAPEHAERGMTLGTSDTWPRLRLRSRGQSSFHSRDTISPRPSPASGRNSRPRWIHASPEGLIKQRAHLRLARGPARAGFAVKQPWPDRLANRPNRRSIQCKDRLTPYPDTRSSVDRAEENSVVCPAPTAVPPARVRLTAAESSLRRHRKLRLARPRGSAPALTSEDGLRLARPQGSDSASTSEDGLRLARPQGSDSASTSEESPPCPTLGSDRPRYRGYIITLPLASSGYGEQDRRPIWLAP

SEQ ID NO: 82099 - protein, 189 aa, Zea mays
  Coding DNA Sequence Number=SeqID_40320
  Gene Ontology: Mol. function=binding; Cellular component=nuclear pore; Biological process=protein import into nucleus, docking
  Homolog annotation: Hit_ID=Q2QZ88; Match level="QueryCoverage=78%, HitCoverage=14%, E-value=1e-56, Identity=70%"; Hit description =Expressed protein
MSYLKVRIIQRSVVSREYEHSRDAIFEWYFQTVATNHHGEDASSVAVRISILQFLTEKKDLTITLIRNRILPLYSLDPCSPYLISMANWVIGQLAICLPEDMSSSIYQSLMKALTMEYVEDITCYPVCASASGAIAELIENSYVPPDWLILLQVVLKRISTGDENESALLFKLLGTIVEGGQEKVVSYS

SEQ ID NO: 82100 - protein, 277 aa, Zea mays
  Coding DNA Sequence Number=SeqID_40321
  Gene Ontology: Mol. function=protein transporter activity; Cellular component=nuclear pore; Biological process=protein import into nucleus, docking
  Homolog annotation: Hit_ID=Q53QC6; Match level="QueryCoverage=71%, HitCoverage=23%, E-value=2e-73, Identity=61%"; Hit description =Expressed protein
  Pfam annotation: Domain name=KOW; Domain location=227-263; Score =22.2; E_value=0.0019; Accession=PF00467.19; Description=KOW motif
MEYVEDITCYPVCASASGAIAELIENSYVPPDWLILLQVVLKRISTEDENESALLFKLLGTIVEVLVAMVQAWESSAPDENKTPEKRFWQSGQSAIAQTISLLLQKAWLFQADNMEGSALPPLSCVNDASVLLEFVMSSVTCMEETESLKVFELVATWADAIANWDSWEEMEDQGVFNTIKEVVNFHQRFDLDGLFLKTHFVRCHSTRNGTIKIGLETNKIMDFIKFDVGNVVMMTGGRNTRRVGVIKNREKHKGSFETIHVLLRDFSMSSFLLFVV

SEQ ID NO: 82101 - protein, 200 aa, Zea mays
  Coding DNA Sequence Number=SeqID_40322
MDVDEFITLLPDGVHHGMPHIQGSYKRLLCSKDPAKLVIPSGGQADATPECGTLHPQVQPPLHLVSPSALRLRILCRRPPPPAQITQIVILVCTTGTVDPLFDDLCRRVLFNNLLKGDFETITTLDVEKHEVDVIMDVLGTQTYLHQMLSFEVQDTGIEPAVSGWHDLGTSALAVHSLNQLTLLLFAWYFVFLMTKMFTI

SEQ ID NO: 82102 - protein, 172 aa, Zea mays
  Coding DNA Sequence Number=SeqID_40323
MDVDEFITLLPDGVHHGMPHIQGSYKRLLCSKDPAKLVIPSGGQADATPECGTLHPQVQPPLHLVSPSALRLRILCRRPPPPAQITQIVILVCTTGTVDPLFDDLCRRVLFNNLLKGDFETITTLDVEKHEVDVIMDVLGTQTYLHQMLSFEVQDTGIEPAVSGWHDLGTSA

SEQ ID NO: 82103 - protein, 409 aa, Zea mays
  Coding DNA Sequence Number=SeqID_40324
  Homolog annotation: Hit_ID=Q10LK8; Match level="QueryCoverage=43%, HitCoverage=15%, E-value=5e-43, Identity=51%"; Hit description=AAA -type ATPase family protein, putative, expressed
  Subcellular localization annotation: CTP_CleavageSite=101; ConfidenceScore=5.29e-01
MTRPPAHPHPAAIPLRAQITRTPAHPRRAAAHRESRLATPLQHNPPAPTSRACSSPAQSSRVDSRPLFGSLHGRPRPWILVTGCPQPTQGRRRRRGDKETPASSPLSGAPPPLASSSIVHPLLTKKFFSPPPTLALKRAHSMGNIAHLATEGSSGREEGLPAGESKRFGVVKLLLYSQITQIVILVCTTAIVDPLFDYLCRRVLFNNLLKVGCMEADIAKPSMAPAEVGIVAGPLPNTVGLEALTGAMDKLEALLRPKEGQSNPVGHKRGTNDKDITAKIKRAMDLSEDLSAHIKKTKDNVAGILNKPQAVATSRRQEPWCRLISQYTMHPTLSIYGALFIIGHGAHHDFRLGVSSTVSHVCRLKQAKRGALLEVFESKVVYVNGKSLDKAAKVTLNGGDKIIFHSPVK

SEQ ID NO: 82104 - protein, 448 aa, Zea mays
  Coding DNA Sequence Number=SeqID_40325
  Homolog annotation: Hit_ID=Q10LK8; Match level="QueryCoverage=39%, HitCoverage=14%, E-value=2e-42, Identity=51%"; Hit description=AAA -type ATPase family protein, putative, expressed
  Subcellular localization annotation: CTP_CleavageSite=101; ConfidenceScore=5.29e-01
MTRPPAHPHPAAIPLRAQITRTPAHPRRAAAHRESRLATPLQHNPPAPTSRACSSPAQSSRVDSRPLFGSLHGRPRPWILVTGCPQPTQGRRRRRGDKETPASSPLSGAPPPLASSSIVHPLLTKKFFSPPPTLALKRAHSMGNIAHLATEGSSGREEGLPAGESKRFGVVKLLLYSQITQIVILVCTTAIVDPLFDYLCRRVLFNNLLKVGCMEADIAKPSMAPAEVGIVAGPLPNTVGLEALTGAMDKLEALLRPKEGQSNPVGHKRGTNDKDITAKIKRAMDLSEDLSAHIKKTKDNVAGILNKPQAVATSRRQEPWCRLISQYTMHPTLSIYGALFIIGHGAHHDFRLGVSSTVSHVCRLKQAKRGALLEVFESKVVCVNGKSLDKVAKVTLNGGDKIIFRSPRGALLEVFESKVVYVNGKSLDKAAKVTLNGGDKIIFHSPVK

SEQ ID NO: 82105 - protein, 124 aa, Zea mays
  Coding DNA Sequence Number=SeqID_40326
MARARAYKARSGVDHTLPRTLKPHRSSVHRCLPASVHAPVKLPERGIEAYFAGEASPRSPEFTTPPECVDRIAVIWPAHPPPTRTTACARSLEDMVAGVTWPSILPPGWTVEWDPTSAEEEHEE

SEQ ID NO: 82106 - protein, 167 aa, Zea mays
  Coding DNA Sequence Number=SeqID_40327
MTEHTSVKLPERGIEAYFAGEASPRSPEFITPPECVDRIAVIWPAHPPLTKTPACARGPSDSGHPRRRAVHRCDRQSLPEPTPPLARTYLTAYCNLADGEYVLVPEQGAAQEVAPDPALEPAPEDLPATALEGSLEDMVAGVTWPSILPPGWTVEWDPTSAEEEHEE

SEQ ID NO: 82107 - protein, 366 aa, Zea mays
  Coding DNA Sequence Number=SeqID_40328
  Homolog annotation: Hit_ID=Q5EUD6; Match level="QueryCoverage=42%, HitCoverage=74%, E-value=2e-79, Identity=78%"; Hit description =Protein disulfide isomerase
  Pfam annotation: Domain name=ERp29; Domain location=225-308; Score =103.2; E_value=7.5e-28; Accession=PF07749.3; Description=Endoplasmic reticulum protein ERp29,
  Pfam annotation: Domain name=Thioredoxin; Domain location=131-209; Score=41.1; E_value=3.8e-09; Accession=PF00085.10; Description =Thioredoxin
  Pfam module annotation: Pfam domain module=ERp29::Thioredoxin; Domain location=225-308::131-209
MAAWGGVSDLARAEAGDHGRASVDRPTVTPGTLERVRIPQSHGLHQRFCQQCSRFLDHLIISMVCWHWKNFCAGAVIKKVTVLLIYIQFIQSAVFKPVISVDNVDSILSHIVVNSLEIPCEMNHSIDKRCRINNLSTSMIALSQLASVFKQDNSVVIANLDADKHTDLAEKYGVSGFPTLKFFPKGNKAGEDYDGGRDLDDFVKFINEKCGTSRDPKGHLTSEAGLVPSLNPLVKEFLNAADDKRKEVLSKIEEDVAKLSGFAAKHGKIYVTAAKKIMDKGSDYTKKETERLHRMLEKKFLCIDSKFTQQELPACKPILTPKWVGLRVVKIMMLLVTPNLYGNLVANTAAGIVGGTGIMPGDRDCS

SEQ ID NO: 82108 - protein, 255 aa, Zea mays
  Coding DNA Sequence Number=SeqID_40329
  Homolog annotation: Hit_ID=Q5EUD6; Match level="QueryCoverage=30%, HitCoverage=55%, E-value=5e-33, Identity=66%"; Hit description =Protein disulfide isomerase
  Pfam annotation: Domain name=Thioredoxin; Domain location=191-253; Score=34.1; E_value=2.8e-07; Accession=PF00085.10; Description =Thioredoxin
MGASAPTAALSSAPPLPLSLSVANGQEEEEGSAGPPLVAMASQCAPPLPPRPRAAAPFLLGHTPPHARPPRCAALTPSVRAAARPCFLASTRVLLRPQSEEAPASCSWSASDPLLCASPASALLVAWRRRHSPAMGCKACDKPKPNYRKGLWSLEEDQKLRDYILLHGHGCWSALPMKAGTNVKIAAIPSSVVVLTSETFDSIVLDEFYAPWCGHCKHLAPIYEKLASVFKQDDSVVIANLDADKHTDLDEKYAF

SEQ ID NO: 82109 - protein, 140 aa, Zea mays
  Coding DNA Sequence Number=SeqID_40330
MTQDGVVCCQQLMKSLGVQVFEWRKGKQIRSVAEVSDPLHSTQSTANRGHRRSFRIGKKRKLNIAGVLQNYVDIRANETKIFMNELNETTKEAGDYSIKWCLDLLKSIEELSDEEKAQATNVLKCEVNREFFMNFKISKV

SEQ ID NO: 82110 - protein, 244 aa, Zea mays
  Coding DNA Sequence Number=SeqID_40331
  Homolog annotation: Hit_ID=P69668; Match level="QueryCoverage=12%, HitCoverage=33%, E-value=8e-09, Identity=93%"; Hit description =Chloroplast 50S ribosomal protein L23
MAIHSYYLNTKEEFDPMLYFCLSEFRFDIKRSFKSGFFVIGIGEFFRIHPPKEPDMRIFHHPARARMKEIRPWRIHNRIGVYNDSMTQDGVVCCQQLMKSLGVQVFEWRKGKVCAPIHCLVAHLDTMAKRYTNPKRSRSFRPSALDTVYSKPGHRRSFRIGKKRKLNIAGVLQNYVDIRANETKIFMNELNETTKEAGDYSIKWCLDLLKSIEELSDEEKAQATNVLKCEVNREFFMNFKISKV

SEQ ID NO: 82111 - protein, 121 aa, Zea mays
  Coding DNA Sequence Number=SeqID_40332
MARVACTLRGKRLDGLSEIYWTSTTIGGPNDLGGSVTGITRDDDGRLHNGTRWTKVSSSSWDALWWCRGASLAGVQGKVASQTPPPTEARGKSPAALAPAPAPGVDAPAPRAGDDAVSPGG

SEQ ID NO: 82112 - protein, 284 aa, Zea mays
  Coding DNA Sequence Number=SeqID_40333
MSFVDGMYQQEVESERPPSHAPQLERPPAPPQSILAAGGDPDGDGDDDNASGSSSHGTELSEEPEPKGWIARPITRDAARGCHFHDALDTLLRRAFYRHTWSIEYRCVVYQHRRGLYLDQWEATCLVRRPDDDLQGAEAFSEHYSITERDTAEAAMQDAARWALSQYCSFFSRVADGLDLKYCPRHSTGSAGGVIASPVGEGNPRLNSMVNLAAMLNIELDHALDELGKVRAEVAELRAECVARHYLDGGSLAPVGIQHPYRSPPHGRFDYGTPNCRTQIDLDP

SEQ ID NO: 82113 - protein, 157 aa, Zea mays
  Coding DNA Sequence Number=SeqID_40334
MGQSPEYEVYFRKSYPTKEKDSQGYAGFRNQGEALNKNQLRYFCRNNLLKQKPSFLRITPELGINAKDNLYPQDLRRDKHFCKSYFDTSSEVSIKVGLTDDIVLVVEHLTGVEIFRPHDPDGTDYEEAKHGKARIGRAIEIKDDDTRHDEVAYGRGK

SEQ ID NO: 82114 - protein, 137 aa, Zea mays
  Coding DNA Sequence Number=SeqID_40335
MALLGACYEQEVLRGRKEGTEQVDLICNGQLTAESAQGSAGNGEVWQPSQLIGPTCTNPCLDGLRWLCTCTRKVGTLQSLYTSLTNPPPELETPSSQRNSWNTPHHLQQYGFENPEYGVYFRKSYPTKKKDSQGYAG

SEQ ID NO: 82115 - protein, 157 aa, Zea mays
  Coding DNA Sequence Number=SeqID_40336
MKAKSHHQPINLRSTCKNYATSKAEYTNTQLDLPGQHGSSSLISCEKQTIRIEFLNLARSGLTALAYNAPLTPTGRRAVAALVPTITGMGDLVSGRVRGKVCGQVHSGTRLTDLPYFSDSAISKVKKCNYSSTVQIWTDPDLQLQKFTTEDSDIQTK

SEQ ID NO: 82116 - protein, 89 aa, Zea mays
  Coding DNA Sequence Number=SeqID_40337
MATCLTRPGSARACPALGPARAAPRLARPHTNARARAYKADPGLDRIKAKSHHQPINLRSTCKNYATSKAEYTNTQLDLPGVRSLLLYL

SEQ ID NO: 82117 - protein, 127 aa, Zea mays
  Coding DNA Sequence Number=SeqID_40338
MSSVSRKWARPSPLLLVLLSYQSSIPLDRPTRWQGGRPSHTINHFLNGTCKNYATNKAEYTNTQLDLPGYKGSSSLISCEKADDSNRVFNLAREILDSSLGSLLLVLLLDRSLLGDEHVLSVGKITI

SEQ ID NO: 82118 - protein, 58 aa, Zea mays
  Coding DNA Sequence Number=SeqID_40339
MDQAVSLAARKQTIQIEFLTLQGLTALAYNAPLTPTAVVQWPHLYPPYLEWETQSQVA

SEQ ID NO: 82119 - protein, 109 aa, Zea mays
  Coding DNA Sequence Number=SeqID_40340
MAHRRAWSTRGGGRPKSGEGDLGLPVKFCWVRGLGELHGPMAKLTEALARLRGDWGGLATVAEALAAMAGRKELAEAKEGWLAGDEIWSPEIRFVSLLKSEANPGFCRV

SEQ ID NO: 82120 - protein, 214 aa, Zea mays
  Coding DNA Sequence Number=SeqID_40341
  Subcellular localization annotation: CTP_CleavageSite=60; ConfidenceScore=5.64e-01
MADTSGSRPFAHPRLPVHAHARSPNFTGSPRSPSPDFGRPPPRVDRALRPDSSPPTSSPACARGPADSDHPRRRPGHRRDPQDLRYTLDHLTGAVSPPMNSPTPASGGDTRFSADFLSHDGFPSILWEVLNSAGYPTPPLYMVQLYEEHRVPRCRDWLTLEAHPLQPGWRSLDSEMVGFRTDDTTEAAAMKTLTTFLWLPSPGDGDAPLGTLPC

SEQ ID NO: 82121 - protein, 120 aa, Zea mays
  Coding DNA Sequence Number=SeqID_40342
  Gene Ontology: Mol. function=protein phosphatase type 2C activity
  Homolog annotation: Hit_ID=Q2HW33; Match level="QueryCoverage=83%, HitCoverage=36%, E-value=2e-13, Identity=49%"; Hit description =Protein phosphatase 2C-like
  Subcellular localization annotation: CTP_CleavageSite=44; ConfidenceScore=5.14e-01
MASLIGDEKKLGDCQFDSESSTTWPHASLCSASSGAATAWTRYRAAAPRCPSSNRGTSWSSPTPATLGLFWTPHPTTAPSHRPAHHPPEAQPPTQESSVLAMSCAFDDYYIKDYGVILAP

SEQ ID NO: 82122 - protein, 173 aa, Zea mays
  Coding DNA Sequence Number=SeqID_40343
  Homolog annotation: Hit_ID=Q2I2S8; Match level="QueryCoverage=46%, HitCoverage=38%, E-value=6e-09, Identity=46%"; Hit description =Ethylene-responsive element-binding protein
  Pfam annotation: Domain name=AP2; Domain location=33-96; Score=92.0; E_value=1.9e-24; Accession=PF00847.10; Description=AP2 domain
MEEHHPRCNATAPTGRVAGGGKMKAVAASAPAEPRYRGVLRWRRGRYVARTRDRKGKRMWLGTFDTAEEAARRYNNETRRLRGPSAITNFPATSDDRVLLPAPSLHAVDEHSFAADESRTPVRPGRVAWRLFDFLFDCVFTAETARWETPSVGSRPIVADSSETPRCRDGREA

SEQ ID NO: 82123 - protein, 227 aa, Zea mays
  Coding DNA Sequence Number=SeqID_40344
  Homolog annotation: Hit_ID=Q84XB2; Match level="QueryCoverage=24%, HitCoverage=21%, E-value=2e-08, Identity=55%"; Hit description =Ethylene response factor 2
  Pfam annotation: Domain name=AP2; Domain location=33-96; Score=92.0; E_value=1.9e-24; Accession=PF00847.10; Description=AP2 domain
MEEHHPRCNATAPTGRVAGGGKMKAVAASAPAEPRYRGVLRWRRGRYVARTRDRKGKRMWLGTFDTAEEAARRYNNETRRLRGPSAITNFPATSDDRVLLPAPSLHAVDEHSFAADESRSVVGSPVSTTPPPKPMDATAETLSTFSSSDEADAGGGAEAAAGAQWRTQNFDIGTPVRPGRVAWRLFDFLFDCVFTAETARWETPSVGSRPIVADSSETPRCRDGREA

SEQ ID NO: 82124 - protein, 692 aa, Zea mays
  Coding DNA Sequence Number=SeqID_40345
  Gene Ontology: Mol. function=transporter activity; Cellular component= membrane; Biological process=oligopeptide transport
  Homolog annotation: Hit_ID=Q336T8; Match level="QueryCoverage=84%, HitCoverage=98%, E-value=0.0, Identity=59%"; Hit description =Nitrate/chlorate transporter, putative, expressed
  Pfam annotation: Domain name=MFS_1; Domain location=45-531; Score =22.9; E_value=2.8e-05; Accession=PF07690.6; Description=Major Facilitator Superfamily
  Pfam annotation: Domain name=PTR2; Domain location=107-515; Score =380.5; E_value=2.5e-111; Accession=PF00854.12; Description=POT family
  Pfam module annotation: Pfam domain module=MFS_1::PTR2; Domain location=45-531::107-515
MSDVAALPETVAEGKMTTTMNDAWDYKGRPAVRASSGGWSSAAMILVVELNERLTTLGVGVNLVTYLIGTMHLGGAASANAVTNFLGASFMLCLLGGFVADTYLGRYLTIAIFTAVQAAGMCVLTVSTAAPGLRPPACADPTGPSRRSSCVEPSGTQLGVLYLGLYLTALGTGGLKSSVSGFGSDQFDESDDGERRSMARFFGWFFFFISIGSLLAVTVLVYVQDHLGRRWGYGACVAAILAGLLLFVTGTSRYRFKKLVGSPLTQIAAVTAAAWRKRALPLPPDPDMLYDVQDAVAAGEDVKGKQKMPRTKQCRFLERAAIVEEAEGSAAGETNKWAACTLTDVEEVKQVVRMLPTWATTIPFWTVYAQMTTFSVSQAQAMDRRLGSGAFEVPAGSLTVFLVGSILLTVPVYDRLVVPLARRFTANPQGLSPLQRISVGLLLSVLAMVAAALTERARRSASLAGATPSVFLLVPQFFLVGVGEAFAYVGQLDFFLRECPRGMKTMSTGLFLSTLSLGFFFSTAIVSAVHAVTTSGGRRPWLTDDLDQGSLHKFYWLLAAISAVDLLAFVAVARGYVYKEKRLAAEAGIVHDDDPRWVGARRSTKEGNKETGIKGKPAAFVFVLRLGRGSSSSGALGSGEAELPIAPEAGLGCCQPLSVEWHSSRSGAGGAVFLSGRSVERRSDCGHFGSVD

SEQ ID NO: 82125 - protein, 692 aa, Zea mays; identical to SEQ ID NO: 82124
  Coding DNA Sequence Number=SeqID_40346
  Gene Ontology: Mol. function=transporter activity; Cellular component= membrane; Biological process=oligopeptide transport
  Homolog annotation: Hit_ID=Q336T8; Match level="QueryCoverage=84%, HitCoverage=98%, E-value=0.0, Identity=59%"; Hit description =Nitrate/chlorate transporter, putative, expressed
  Pfam annotation: Domain name=MFS_1; Domain location=45-531; Score =22.9; E_value=2.8e-05; Accession=PF07690.6; Description=Major Facilitator Superfamily
  Pfam annotation: Domain name=PTR2; Domain location=107-515; Score =380.5; E_value=2.5e-111; Accession=PF00854.12; Description=POT family
  Pfam module annotation: Pfam domain module=MFS_1::PTR2; Domain location=45-531::107-515

SEQ ID NO: 82126 - protein, 761 aa, Zea mays
  Coding DNA Sequence Number=SeqID_40347
  Gene Ontology: Mol. function=cysteine-type peptidase activity; Biological process=proteolysis
  Homolog annotation: Hit_ID=Q53MK8; Match level="QueryCoverage=41%, HitCoverage=37%, E-value=5e-23, Identity=23%"; Hit description=Ulp1 protease family, C-terminal catalytic domain, putative
  Pfam annotation: Domain name=Peptidase_C48; Domain location=505-751; Score=-2.4; E_value=0.00086; Accession=PF02902.9; Description=Ulp1 protease family, C-terminal catalytic domain
MMIAANALFGYSKKLNVRCNPQDVIASINILNERQREAIRRKGFSSILDMTVDALCSRSHLQWLMDKLDPKDMTIRPGPGKELKITKDIVHLILGVPNHGGGKPLGIDEAVAASNLRAELGVAKDEFNVAFLQDRLRKGEDDDLSIRCFFLILFNRLLFPTASWGITYHEVLLTEEMHRFHEIDWCQLIFNDLCEAAKKWHNRITTNVSTTIYGCSIVVLNSIKALTKADKRKVRHGAESFGHCENTKVDMDSYYFLLNNQPECRTNIFDAPRPGPMPRPTFNIKLPSIKEMMSSKINDLPHRHRSKFTDILAAYDLEVDKSCVAIKDSIDKIIVKQYDIADKFIELIDEVLRAESENLENETDEPQQPVNSADSAGHTVDATQPTPDMPSQASQLETQLGATQFEEIHERQQHIRTVLETFPDESDVVSDQQRGAMATEEMEQNDSGPVFDQTPTPHVDTLKGTTISGSDPPLTEQECIRSLWDLICSKDIDQSRVVIDYGDYSANCMDIYESFAEGKCLEDVFMQCFIECVRDDSKNHRRTLTSNRLILDVNVGALLNFEEQERHSKNPQPFDQNVLQNCLHNTLPALVNLDKCKSIMVPMLSRGHWTLYVINLHHRVIHILDSNPYGIQLGGTEWKDYHCDPIYLGGRKFPWARVIMSRLSKALQHVCPNAEFPKFGNFPLDMPSNCPTMRTGSNDCGFFVMSYMKSYDHNAGVISSFNQPDNSRDLRAHALHQLTFHRINKALPLPLDIQRFMFARN

SEQ ID NO: 82127 - protein, 120 aa, Zea mays
  Coding DNA Sequence Number=SeqID_40348
  Homolog annotation: Hit_ID=Q10N63; Match level="QueryCoverage=79%, HitCoverage=14%, E-value=4e-31, Identity=66%"; Hit description =Expressed protein
GSRSYKSAKVAAKRLEEAALSCKGDERVQLLRRWLVTLKETQRATTVVRELQLGDNPDQTAPLLDLYIDYDSGAEPTNFFHVFLYSQALECVVLSLGAISGLKINADIARFYIFCWAVED

SEQ ID NO: 82128 - protein, 104 aa, Zea mays
  Coding DNA Sequence Number=SeqID_40349
  Homolog annotation: Hit_ID=Q10N63; Match level="QueryCoverage=85%, HitCoverage=13%, E-value=9e-28, Identity=66%"; Hit description =Expressed protein
MYGHLTSVYVSAKSKGSRSYKSAKVAAKRLEEAALSCKGDERVQLLRRWLVTLKETQRATTVVRELQLGDNPDQTAPLLDLYIDYDSGAEPTNFFHVFLYSQAL

SEQ ID NO: 82129 - protein, 176 aa, Zea mays
  Coding DNA Sequence Number=SeqID_40350
  Homolog annotation: Hit_ID=Q10N63; Match level="QueryCoverage=60%, HitCoverage=17%, E-value=7e-32, Identity=61%"; Hit description =Expressed protein
MYGHLTSVYVSAKSKGSRSYKSAKVAAKRLEEAALSCKGDERVQLLRRWLVTLKETQRATTVVRELQLGDNPDQTAPLLDLYIDYDSGAEPTNFFHVFLYSQALECVVLSLIETEKLLAQLFETEMNRRLKEDTYKGKKFNAICHFLGYQARGALPSKFDCDYAYASPSPAHLIKN

SEQ ID NO: 82130 - protein, 109 aa, Zea mays
  Coding DNA Sequence Number=SeqID_40351
  Gene Ontology: Mol. function=diphosphate-fructose-6-phosphate 1 -phosphotransferase activity; Cellular component=6-phosphofructokinase complex; Biological process=glycolysis
  Homolog annotation: Hit_ID=Q9SYP2; Match level="QueryCoverage=50%, HitCoverage=8%, E-value=1e-20, Identity=85%"; Hit description =Pyrophosphate-dependent phosphofructokinase alpha subunit
MAIYKTTLKSKSSINEVNQVAQLRIIIKSKSCNGVGPLCTSQQTETEKLLAQLVETEMNRCLKEDTYKGKKFNAICHFLSYQARGALPSKFDCDYAYASPSLAHLIKEY

SEQ ID NO: 82131 - protein, 66 aa, Zea mays
  Coding DNA Sequence Number=SeqID_40352
MGGGSRLGRNNRAKAEKTNETSHDGETMPLRESVSRLVSNEYREEMHAPTTSAENGVVRRWRHEGR

SEQ ID NO: 82132 - protein, 289 aa, Zea mays
  Coding DNA Sequence Number=SeqID_40353
MDPRPVAATPLPRRAVAEVPRSAARPLCGQAAASPKPRGGGTSKADEQATPVDTLLNGSCVGPVHQTRSIWPLYLRTIMIILASVATTSFVILLLFYLPSCLHLRTTPFSAEVVGACISSLYSLDTSLDTDSRSGYCTTTRTFHIMRAPSFSPSWDVSFVFSAFALLFLPNLLPPPMVAAASRPTLVDAVMGGILSMSALDAQVFVVSFSGNEQDGAKDCPPLMWAIMGSKPQTHKGWKACGRAEKAAALANLDLTPGRDPVKEQRSYGLSWDRQATQDASRRRIVEER

SEQ ID NO: 82133 - protein, 182 aa, Zea mays
  Coding DNA Sequence Number=SeqID_40354
MTANRSLAAAPWSVHSRNTSEAQQHAYDGSKITRRRLQKAQEGATKVVGQPRAPICFTGEERVQQRPPPFTVRSNAPTGDSRGWWNRARAHTWSLRRVGARPLRNSEVPEELPARGERGPRGEDLAGSVTKEREQRLTRGPGGAAQGRESDRWPPPVSQMRNQVDAWGETDVSGPLVGATTL

SEQ ID NO: 82134 - protein, 201 aa, Zea mays
  Coding DNA Sequence Number=SeqID_40355
  Subcellular localization annotation: CTP_CleavageSite=34; ConfidenceScore=5.09e-01
MTLPKDKSSHSLPRPRVHPCPVPPSPRITCWSVAADREGRRPLLHPFFAGEANWGAWLANDLRCALESEIGAAAEPIGPRIQWISSPVWVERGKLAHHRGWGALLLNPQRGWGDVEAPPRSGSSPSSVAEVESEPLGRARRRLLAEARAEFESWGRAKRSSSSSGAEPKSEPWVGRSGVRRLPGLSPSPSPGSGGAELKGN

SEQ ID NO: 82135 - protein, 118 aa, Zea mays
  Coding DNA Sequence Number=SeqID_40356
  Subcellular localization annotation: CTP_CleavageSite=19; ConfidenceScore=5.42e-01
MPPGSGPARCPPPNLPRGRGAAKKNPRRLGRQGTPNPANHRVFERKLRPKPSGGGHVCLGVTPKDTPNTPPRGEGRGVWPPAPQGERPGARPAIRPYGPIERPSLSSDRDPRSVGTTR

SEQ ID NO: 82136 - protein, 90 aa, Zea mays
  Coding DNA Sequence Number=SeqID_40357
MKNVAKCDTWCELQNPTNHRVFERKLRPKPSGGGHVCLGVTPKDTPNTPPRGEGCGVWPPAPQGERPGARPAIRPYGPIERPSLSSDRDP

SEQ ID NO: 82137 - protein, 86 aa, Zea mays
  Coding DNA Sequence Number=SeqID_40358
MKNNPANHRVFERKLRPKPSGGGHVCLGITPKDTPNTPPRGEGRGVWPPAPQGERPGARPAIRPYGPIERPSLSSDRDPRSVGTTR

SEQ ID NO: 82138 - protein, 90 aa, Zea mays
  Coding DNA Sequence Number=SeqID_40359
MKNVAKCDTWCELQNPANHRVFERKLRPKPSGGGHVCLGVTPKDTPNTPPRGEGRGVWPPAPQGERPGARPAIRPYGPIERPSLSSDRDP

SEQ ID NO: 82139 - protein, 90 aa, Zea mays; identical to SEQ ID NO: 82138
  Coding DNA Sequence Number=SeqID_40360

SEQ ID NO: 82140 - protein, 97 aa, Zea mays
  Coding DNA Sequence Number=SeqID_40361
MGVPRKRTHGAPGAKEHQYYLLPRGAVGPPSAPRAANPANHRVFERKLRPKPSGGGHVCLGVTPKDTPNTPPRGEGRGVWPPAPQGERHGARPDIRP

SEQ ID NO: 82141 - protein, 194 aa, Zea mays
  Coding DNA Sequence Number=SeqID_40362
MKNVAKCDTWCELQNPANHRVFERKLRPKPSGGGHVCLGVTPKDTPNTPPRGEGRGVWPPAPQGERPGARPAIRPYGPIERPSLSSDRDPRRETDSEQVPRGKDEKDFEKRVKECLKLPGGKRMGAGDAHRPYAERLLLVRRSARGVDRCRPRRRPKPGGPRRPRQPSSARTKPGMRKEADEREALTGRTAGRP

SEQ ID NO: 82142 - protein, 119 aa, Zea mays
  Coding DNA Sequence Number=SeqID_40363
MKNVAKCDTWCELQNPANHRVFERKLRPKPSGGGHVCLGVTLKDTPNTPPRGEGRGVWPPRRRASVPARGRPFSPKDPSSDRACPRTATPGGLAARIVVWRGVLSDGPGPSSLERDAWE

SEQ ID NO: 82143 - protein, 235 aa, Zea mays
  Coding DNA Sequence Number=SeqID_40364
MGKVAIEFLFYIPGGPIESAVRNRKAKVSFMSSHPVGKLRDGYSRDKLWLDHGCYCRVGYVCLLEQDKSIRIRCNSGLIPQLITLNRRSKSNKYHKNKHSSIQILIKIVLFLFLRVGLLVLKVTLGTGFQSVKSTFVFRMKRFRPTVNIPLIPLLSHPDFGAPRPGREHNHQRSTGSITQIAPRLRTGLRVEYLNGQGLICETGSAKGIRDQRLDLIYEGVRDLDHRISDQGLGF

SEQ ID NO: 82144 - protein, 81 aa, Zea mays
  Coding DNA Sequence Number=SeqID_40365
MRQPLQRCKTGILAVLTVMSGSDTHMIKLWNLNSICHMHCIAELLLYSKDVTFDPVPLCIICVRLGPSTPGVYVRARVLDP

SEQ ID NO: 82145 - protein, 99 aa, Zea mays
  Coding DNA Sequence Number=SeqID_40366
MNVCELTLAVSHPPQVKNRTPVIYSKDVTFDPVPLCIICVRLGPSTPGVYVRARVLVPLKSGCDRSGIRGMLTVGRNLDRTGQPFFTYPCYSDSFLNFS

SEQ ID NO: 82146 - protein, 57 aa, Zea mays
  Coding DNA Sequence Number=SeqID_40367
MNVCELTLAVSHPHRSRTELLLYSKDVTFDPVPLCIICVRLGPSTPGVYVRTRVFDP

SEQ ID NO: 82147 - protein, 71 aa, Zea mays
  Coding DNA Sequence Number=SeqID_40368
MERKEEQVRQQEMSAPVRQSKGSRGDVAWPPPGTSCWAGARGCGVGRWGPGLLGVAAGVGGRDGSSGREGK

SEQ ID NO: 82148 - protein, 389 aa, Zea mays
  Coding DNA Sequence Number=SeqID_40369
  Homolog annotation: Hit_ID=Q5NB09; Match level="QueryCoverage=31%, HitCoverage=39%, E-value=4e-31, Identity=56%"; Hit description =Putative MADS-box protein AGL35
  Pfam annotation: Domain name=SRF-TF; Domain location=9-60; Score =41.5; E_value=2.9e-09; Accession=PF00319.9; Description=SRF-type transcription factor (DNA-binding and dimerisation domain)
MARKKVNLQWISNNATRRATYKRRTQGLEKKASELATLCGIKLCVVVYGEGEAQPKVWPSHEEAKQLLLKFNGMLDVGSLKKTKNQEEFLHGRSLRLREQVSKLDLENRERETLDLLHDSMCGGRLAGGEGRGKDELLSLREMVETKMRRIKARLQQLVGQGVLPPKPPLPAAPSSLQAQASCYTYNNMQSMALLEEHRHSQQDWRAVHNLAPNYSPFADLAAATREHRHLLTTLQDSISEEPPILTNPGNGEEGRAGEAAGDVSASETKQRRVGTARGRRSGLGLRDAAGWGRSPVAVAVAAWGRSPVAAAQAAGIARPLGARRRLARGCGLAAAWEWLLGGDVAWPPPGTSCWAGARGCGVGRWGPGLLGVAAGVGGRDVSSGREGK

SEQ ID NO: 82149 - protein, 256 aa, Zea mays
  Coding DNA Sequence Number=SeqID_40370
  Gene Ontology: Mol. function=sequence-specific DNA binding; Cellular component=nucleus; Biological process=regulation of transcription, DNA-dependent
  Homolog annotation: Hit_ID=Q5QMQ5; Match level="QueryCoverage=71%, HitCoverage=77%, E-value=6e-54, Identity=59%"; Hit description =Homeobox transcription factor-like
  Pfam annotation: Domain name=Homeobox; Domain location=42-98; Score =75.4; E_value=1.8e-19; Accession=PF00046.19; Description=Homeobox domain
  Subcellular localization annotation: CTP_CleavageSite=45; ConfidenceScore=5.33e-01
MESSDDGGSGPAAGSPGPPSAPAAVGGASSAPGASGSGGKPPVKRVMKTPYQLEVLERTYAEDSYPNETKRAELSVQLNLTDRQLQMWFCHRRLKDRKPPAKRQLRDEEVSVPVIGPPPPVLPPPLPPSEMMVGTVGTYGEQLLPYSRRGSGRLSAAPRLSVPEIGRRYYEPPQVMLPHMAPVHLMQAEHRVIDSVEALIGEPLRDDGPVLGIEFDPLPPGAFGAPIELGGSSGAELGRAGEAALRQSSGTESLRL

SEQ ID NO: 82150 - protein, 1833 aa, Zea mays
  Coding DNA Sequence Number=SeqID_40371
  Gene Ontology: Mol. function=glutamate-ammonia ligase activity; Cellular component=nucleus; Biological process=nitrogen compound metabolic process
  Homolog annotation: Hit_ID=UPI0000162EFD; Match level="QueryCoverage =82%, HitCoverage=83%, E-value=0.0, Identity=37%"; Hit description=HB- 1; transcription factor
  Pfam annotation: Domain name=DDT; Domain location=620-678; Score =82.7; E_value=1.2e-21; Accession=PF02791.7; Description=DDT domain
  Pfam annotation: Domain name=Homeobox; Domain location=42-115; Score =54.5; E_value=3.4e-13; Accession=PF00046.19; Description=Homeobox domain
  Pfam annotation: Domain name=TolA; Domain location=365-702; Score= -147.7; E_value=0.043; Accession=PF06519.2; Description=TolA protein
  Pfam module annotation: Pfam domain module=DDT::Homeobox::TolA; Domain location=620-678::42-115::365-702
  Subcellular localization annotation: CTP_CleavageSite=45; ConfidenceScore=5.39e-01
MESSDDGGSGPAAGSPGPPSAPAAVGGASSAPGASGSGGKPPVKRVMKTPYQLEVLERTYAAFDRTVRVVFMGILFCAEDSYPNETKRAELSVQLNLTDRQLQMWFCHRRLKDRKPPAKRQLRDEEVSVPVIGPPPPVLPPPLPPSEMMVGTVGTYGEQLLPYSRRGSGRLSAAPRLSVPEIGRRYYEPPQVMLPHMAPVHLMQAEHRVIDSVEALIGEPLRDDGPVLGIEFDPLPPGAFGAPIVPEQPRQPFRSYETKMFSGPKTMKASAILPTTDPLLQNTGKRKSFIGSSHLGSQAVHEYQFLPEQPSDTYERASQSHFYDSSAEASNLRVAPLSTGSRFLHGVEQAPSYTFHSQSSGSSHLTQRGSGRSPIASALTDHEGALSNINASTTPIHGQLGIPQVAGFESPLASPERLGYHDEDTYHMDRKRKHNEEAKIAREVEAHEKRIRKELEKQDLLNRKREEQMRREMERHDRERRKEEERLMRERQREEEKFQREQRREHKRMEKFMQKQSIRAEKLRQREELRREKEAARQKAANERATARRIARESMELMEDERLELLELASRSKGLPSMVSLDSDTLQQLDSFRGMLGKFPPETVRLKVPFSIKPWAASEDIIGNLLMAWKFFVTFGDVLGLPSFTLDEFVQALHDYDSRLLGELHVSLLKSVIKDIEDVARTPSVALGVNQSSSANPGGGHPQIVEGAYAWGINILNWQRHLNFLTWPEILRQFGLCAGFGPQLKKSDAEIVHHRDDNEGRNGVDVISILRNGSAAVKAAALMKERGYTNRRRSRHRLTPGTVKFAAFHVLSLEGSKGLTILEVAEKIQKSGLRDLTTSKTPEASISAALSRDTKLFERTAPSTYCVKTPYRKDPDDSEAVLAAAREKIRAFQNALPECEEVEKDVDEAERDDDSECDDADDDADGDDVNIEDKDAKSPLVGAQYGAQITVVGDIKKESNIVMNTSVPPSIQIKSSASVPFHTLDSKASSSTDPEVGDDAKDIEIDESNQGESWVQGLAEGDYCDLSVDERLNALVALIAVANEGNSIRAILEERLEAASALKKQLWAEAQLDKRRIRDDFTSKMQYDSYVSMKVDTDQENNAAEITLTPVHDPIKNNNGNANLMNNGLLVDKQNQLTTGDVYHQRNGASRESSTNAESLSVQQYASSEKTRSQLKSFIGHKAEQLYVYRSLPLGQDRRRNRYWQFSASSSSYDPGSGRIFFESRDGYWRVIDTSEAFEALVASLDTRGIRESHLHSILQSIEPTFKEAVERKRCANLEHPTGRTSENGSNESPNCNNEFGSPCSTLSGVASDNLMAHSDIFKIEVGRNEAEKNSISKRASVFLKWIWRECYSHQSTYAMRYGKKRCPELIHSCDYCYQIYLAEERHCSCHKTFKHIHNFLEHSSQCEEKQRTDPNWKMQTVDLSVPVGLRLLRLLLATIEWQSLDRIREEMLSVLESAIKRDYLSSNFETTTELLNSSTQDFATQNSAGGSGSATALPWVPDTTAAVALRLLDLDASISYTLHPKLGSNKEQESGDFMKLPPRYPSMNKGKQEIEQFRPIGFDQQDGTLLPNSNGRRGRGRGGRGGSRGGRSRGHGGRVPRGIGSSSRIQFRDDNSMLYGRAPRKNARGGRGRGRGRGRGLRTVRPRQPSELSARSIPKANLLGSFSMLSKTNHTGTTHSPESSGAEEWAFERREYVKDDENNLVSQSDESEENVEPMNEEYGEHISGYPRDNSDSRPVQMMGDGSDDNDEDAEGDEGEEDGEDYEAEDPGDEDDDVEMDGDDDVEVDEDDDIEMDGDDDIEDDDDDDGGDGAANGDEDGGGTSSYSSEYSE

SEQ ID NO: 82151 - protein, 1399 aa, Zea mays
  Coding DNA Sequence Number=SeqID_40372
  Gene Ontology: Mol. function=protein serine/threonine kinase activity; Cellular component=membrane; Biological process=protein amino acid phosphorylation
  Homolog annotation: Hit_ID=Q5NBC2; Match level="QueryCoverage=61%, HitCoverage=97%, E-value=0.0, Identity=67%"; Hit description =Putative receptor-like protein kinase
  Pfam annotation: Domain name=APH; Domain location=1023-1199; Score= -12.3; E_value=0.043; Accession=PF01636.13; Description =Phosphotransferase enzyme family
  Pfam annotation: Domain name=Pkinase; Domain location=1020-1301; Score=107.0; E_value=5.5e-29; Accession=PF00069.15; Description =Protein kinase domain
  Pfam annotation: Domain name=Pkinase_Tyr; Domain location=1020-1291; Score=128.6; E_value=1.8e-35; Accession=PF07714.7; Description =Protein tyrosine kinase
  Pfam module annotation: Pfam domain module=APH::Pkinase::Pkinase_Tyr; Domain location=1023-1199::1020-1301::1020-1291
MTASKKAGPSEGFDSHPKARIVRDDSRYVRYIAEARAMLPRYPRTFPRPAGMICNGIPLEGGIEPSDPVEGVWVRRITHRYFWSAPLGHQPTPNERGTGVHSDHPLAAHWKHHRLGGCSRTRLRPKLLTASTNQLDNLEPDHAPGLLPGRMRERSDRPRHHEKHSDLRGVKPLLRGLGGYTRQENSAARSAPTAVSATPATTDNKSRSITEFSLGRNRKLRLARPHAPTSGRGFRLARPHASASGGGFRLARPQAPASGGGLRLARPSDSASTPVSGGIASSPDPGLGLKRSYKEQDQRPIWLTPVTGNDGLRHSSGGHAITCTGPKLSPNGHVGMYTGLRHSTAGHVAHATFNIVVDHIGTHDFVQEFLANQTFPTLFGWGISKPKKKDEETKSGVLKVFPYCFKKHPVFKCPCADWLTYIELVCDEILGNYTIKEDRLMMAAFSNRAKSRLNRVTDALGFEYLDYPKIAEKADVRGFSAACPCCLGSRSTLRGLPAWHPLLVLLLVAGVAAFAESKVYAPADRVLLNCGSTTDGLDSDGRRWAADTNDNTWLTDSGKSSVMMAADRADNGLPSPIPYMTARVFTVEAVYNFTVNPRDRHWVRLHFYPSSYNGLAADSFHFSVSTSTGITLLRNFSVYTYAKALTQAFIIREFSLPPTPAGFLALTFTPTPMGNESYAYVNGIEVISMPDIFVDPAIMVGFADQTVDIASSTLQTMYRLNVGGSYIPPSNDSGLTRHWYDDTPYVYGATQGVTYRAGPHFQIKYPSETAEYAAPPEVYLDTRSMGSDPRLNQNYNLTWTMAVDGNFTYVARLHFCELLLIRANQRAFDIYVNNKTAQADADVIGMTSEKGVPMYKDYAVYMAEEPDGQAMWVALHPSVALRPQFYDAILNGLEIFKLNDTAGNLAAPGPEPSRLLAKAELGAGEQNAPESQPHPHMARVMGGTASGAAVLGIVAAICVVWYHEKKSRETASNCGSHNSGWLPLFHSNTSGKSSGHIPANLAGMCRHFSFAEIKVATRNFSESLVIGVGGFGKVYRGVVDGDTKVAIKRSNPSSEQGVQEFQTEVEMLSKLRHRHLVSLIGFCEDAGEMILVYDYMEHGTLREHLYMGGKAPLSWRHRLDICIGAARGLHYLHTGAKYTIIHRDVKTTNILVDGDWVAKVSDFGLSKSGPTTVNQTHVSTMVKGSFGYLDPEYFRRQQLTDKSDVYSFGVVLFEVLLARPALDPALPREKVSLADYALSCQRNGTLLDVLDPTIKDQIAPECFKKVADTAEKCLAEQSIDRPPMGDVLWNLEFALQLQDTFEGGSCGRRTVGDDDGSGTGRPALEPSDSNGSTASFTTLRTLSTSRARETCVIMEETDDEVANSAAFSQLVRPSGRRIYVAKNLIRPYSAARFQFQATF

SEQ ID NO: 82152 - protein, 102 aa, Zea mays
  Coding DNA Sequence Number=SeqID_40373
MEHVRTEPHPLKNEWGRNGKKDDDLKNEALPFGDFSCGTISASSDFAGEAAPRLCKEHTADAESIWIRSVVSVIGKEHNLSKKHRKRTLKKETKHTRIEAMV

SEQ ID NO: 82153 - protein, 417 aa, Zea mays
  Coding DNA Sequence Number=SeqID_40374
  Homolog annotation: Hit_ID=Q8H3A4; Match level="QueryCoverage=13%, HitCoverage=15%, E-value=8e-09, Identity=58%"; Hit description=ABC transporter permease protein-like protein
  Subcellular localization annotation: CTP_CleavageSite=67; ConfidenceScore=5.78e-01
MVETRRSSAAAAGKRTSPSPSSSSVPPPKRPKIKESISSLPLLQRVQSGGRSRSNSNPQCHGQSCSRSAHRFADAAIEASDGTVYFSDASTRFGFDKWFLQQSSMHHAGLLCPQRGDGKMVVFVMRQAVWNAVTNNEVVQGFRRSLHDEAAQHEESEVMDGEDDDDEDNDDDYDTKKNKGTAGGEGQQGKRPTKCKQQYCVLMLGVKMVATLRFLSFKKKHRGREVTVIDCTSPPVPWPADDASGSLGAASPAKSELAEIVPQEKSPKGNASFFSFHSTNAAESKVFYLKMKGDYHRKDAAGSTMNSYKAAQVSSDCSPLLEAGQAESLGTELLEMVPSREEEIKLKEYREDVVSTFVVDDYVRLEFKGSTFTGSWKSFSSPKISSTFLLVIAIVSNGIVVRVARVLTLLYIVKLSG

SEQ ID NO: 82154 - protein, 86 aa, Zea mays
  Coding DNA Sequence Number=SeqID_40375
MSTRSRASGTAPTSYFDFDQIHELQESTLLTLQIWAASVDIQMFEILLCIGNKADLIPDHSVQNIEYIEAFASNADFDKCKLSPRL

SEQ ID NO: 82155 - protein, 140 aa, Zea mays
  Coding DNA Sequence Number=SeqID_40376
  Gene Ontology: Mol. function=nucleic acid binding; Cellular component= nucleus; Biological process=selenocysteine incorporation
  Homolog annotation: Hit_ID=Q7EZ58; Match level="QueryCoverage=90%, HitCoverage=59%, E-value=3e-35, Identity=58%"; Hit description=RNA Binding Protein-like
MADLRQLMVCPKHWKSESELPCMIALANLVLIMPATITSVKIIRNKQTGHSEGYGFIEFSSRATAEHTLINFNRQMMSNVEMTFKLNWASASTGDKRGDSGSDHTIFVGDLAHGVTDSMLEDVFRAKYPSVRGANVVVDT

SEQ ID NO: 82156 - protein, 579 aa, Zea mays
  Coding DNA Sequence Number=SeqID_40377
  Homolog annotation: Hit_ID=Q5MJ53; Match level="QueryCoverage=18%, HitCoverage=55%, E-value=1e-37, Identity=69%"; Hit description=AT -rich element binding factor 3
  Pfam annotation: Domain name=DUF632; Domain location=211-463; Score= -125.0; E_value=0.0048; Accession=PF04782.3; Description=Protein of unknown function (DUF632)
  Pfam annotation: Domain name=RRM_1; Domain location=292-365; Score =3.8; E_value=0.064; Accession=PF00076.12; Description=RNA recognition motif. (a.k.a. RRM, RBD, or
  Pfam annotation: Domain name=peroxidase; Domain location=127-403; Score=-73.0; E_value=0.0014; Accession=PF00141.13; Description =Peroxidase
  Pfam module annotation: Pfam domain module=DUF632::RRM_1::peroxidase; Domain location=211-463::292-365::127-403
MVGLVGGSTARAEHVVANAGGEAEYVRRMHRHAPTEHQCTSTLVKHIKAPVHLVWELVRRFDQPQRYKPFVRNCVVRGDQLEVGSLRDVNVNPGLPATTSTERLEQLDDDLHILGVKFVGGDHRLQVRAAAAHTIKAIRPTGVSAYQNWGPLRHHEEPRRAGARSQRRIEIVVRLLEPIKEQSPILSYADFYQLAGVVAVEVTGGPDVPFHPGREAVVLCMADLRQLMVCPKHWKSETEAARQLALMLEVERPSYQGRNSVYQSSSKMMSAISVAHLGCKDMDAVDVGVVGMVDSQSLSSALEKLYFWERKLYAEVKITSVKIIRNKQTGHSEGYGFIEFSSRAAAEHTLINFNGQMMSNVEMTFKLNWASASTGDKRGDSGSDHTIFVGDLAHGVTDSMLEDVFRANSTSRLDHVRLGPWSPTLLPTPPSAWSPVLDSACRLLPDKPRAAAAVRALGFSSTSTAGSGSRAAPQCSTRAADPVAASFLSSSCGPAPPLLQRAAAMARRHGWQLPAHTLQALSVLILYVRCTAIDPADSGILISMDDILIYKSEDTQDEAGKPGLRNDEDIRKHKSCFGR

SEQ ID NO: 82157 - protein, 77 aa, Zea mays
  Coding DNA Sequence Number=SeqID_40378
  Subcellular localization annotation: CTP_CleavageSite=39; ConfidenceScore=5.38e-01
MEAAAAASLSSSRVNVRVLLACSRKKKSKSGAAASRPVLASSRAEEDGVPVWTLQIIRQIDVASSRKKYENMMLRRA

SEQ ID NO: 82158 - protein, 165 aa, Zea mays
  Coding DNA Sequence Number=SeqID_40379
MNVVLFMMRQLNDLKMDKNQNLAYAPYIIPLIKAKTRFEVRDAVFFRARGGEDRPGRRRAALRLLLPRAGEEDTDVDARGGQGRRRRRFHFREEARIGRYAAAPLFGFFFREQARRTRTPAASIFARRTGTPPQSLPFPRGGQVRSMGGDDGMEGAFDFIFLMSG

SEQ ID NO: 82159 - protein, 457 aa, Zea mays
  Coding DNA Sequence Number=SeqID_40380
  Homolog annotation: Hit_ID=Q2RA11; Match level="QueryCoverage=56%, HitCoverage=42%, E-value=2e-38, Identity=40%"; Hit description=CBS domain-containing protein, putative, expressed
  Pfam annotation: Domain name=PB1; Domain location=227-307; Score =12.6; E_value=0.012; Accession=PF00564.15; Description=PB1 domain
MAIVQASCTTEFIVAGCLSAILASRFLNTKVFFGYAPYSNRYMHPYQKKNIKIFSNLNLKIFSNKDQIVHEDTCRDIVGGTNGRATTQTPYRTARWQCPTQPRATKSNSSSTEPRPVRPLDSKIPKFKHIEQGDGKFLHIPVLDGDGRVAACLDVLQLTHAAISMVSLSMAHALSFLIHLSNLSPSEMVFPLKVEGGPGAATDVANTIMQKFWDSALALEQPQEEDFDSHRTRRDACIDSLVVGSESLDELISSVIQRLGMVDEKRVIQLLYEDNESDKVLLTTNSDLTGAVFCAKSSGLKVFGFSDVDPLLHQKYEIKGTLHPIIATHASYLSSSRKWKRLRRRPCPPRENGSRRRPCPPRLLAEEEAEERRGGVPAYPRLLAEMEAAAAASLSSSRVNVRVLLACSRKKKSKSGAAASRPVLASSRAEEDGVPVWTLQIIRQIDVASSRKNMKIW

SEQ ID NO: 82160 - protein, 335 aa, Zea mays
  Coding DNA Sequence Number=SeqID_40381
  Homolog annotation: Hit_ID=Q2RA11; Match level="QueryCoverage=77%, HitCoverage=42%, E-value=2e-38, Identity=40%"; Hit description=CBS domain-containing protein, putative, expressed
  Pfam annotation: Domain name=PB1; Domain location=227-307; Score =15.0; E_value=0.0072; Accession=PF00564.15; Description=PB1 domain
MAIVQASCTTEFIVAGCLSAILASRFLNTKVFFGYAPYSNRYMHPYQKKNIKIFSNLNLKIFSNKDQIVHEDTCRDIVGGTNGRATTQTPYRTARWQCPTQPRATKSNSSSTEPRPVRPLDSKIPKFKHIEQGDGKFLHIPVLDGDGRVAACLDVLQLTHAAISMVSLSMAHALSFLIHLSNLSPSEMVFPLKVEGGPGAATDVANTIMQKFWDSALALEQPREEDFDSHRTRRDACIDSLVVGSESFDELISSVIQRLGMVDEKRVIQLLYEDDESDKVLLTTNSDLTGAVFCAKSSGLKVFGFSDVDPLLYGYTIFIALWGYLVCNHSFPQLT

SEQ ID NO: 82161 - protein, 585 aa, Zea mays
  Coding DNA Sequence Number=SeqID_40382
  Gene Ontology: Mol. function=zinc ion binding; Cellular component =nucleus; Biological process=endosome to lysosome transport
  Homolog annotation: Hit_ID=Q655H8; Match level="QueryCoverage=99%, HitCoverage=51%, E-value=0.0, Identity=70%"; Hit description=LvsC -like
  Pfam annotation: Domain name=Beach; Domain location=321-540; Score =337.2; E_value=2.8e-98; Accession=PF02138.8; Description=BeigeBEACH domain
MDERGPWSANPFPNDVVTHWKLDKTEDRWRRRFKFKRNYKFDERLCQPSQSRNESTATLADQLYISAKITQKMKQFLVKGVRGITEDSSYEQFEDTNDASESSQSNPSESQNLNNAADTSDHHASAHYKKEPSSTNGDNDYTKVLCSVRCVFVTPKRKLAGQLDITRTVMHFSFEFLVEGTGGSSVFSKFKDKKDSDCKNELGGVDRLDGCRDSMIETNGVLMQNQSNKIKRHKRWNITKIKGVHWTRYLLQYTAMEIFFDDSTAPIFLNFSSQKDTKNAGTLLVSLRNEALFPKGSTKDKNNIISFVDRRVGLEMAENARERWKRREISNFEYLVILNTLAGRSYNDLTQYPIFPWVLADYTSEKLDFNKSSTFRDLSKPVGALDENRFKGGKFDHADRLFQSIESAYINSLSNTSDVKELIPEFFYMPEFLENSNSYHLGVKQDGEPIGDVALPPWAKGSPEEFIHINREALESEYVSSNLHNWIDLIFGYKQRGQPAVEEHSFGIGSDVISPRKIGTFLAENVKFGRQFLATMQNSRDNYLILCGNWENSFQIISLSDGRIMQSIRQHKDVVSCVAVTYENF

SEQ ID NO: 82162 - protein, 974 aa, Zea mays
  Coding DNA Sequence Number=SeqID_40383
  Gene Ontology: Mol. function=molecular_function; Cellular component =nucleus; Biological process=biological_process
  Homolog annotation: Hit_ID=Q655H8; Match level="QueryCoverage=92%, HitCoverage=71%, E-value=0.0, Identity=72%"; Hit description=LvsC -like
  Pfam annotation: Domain name=Beach; Domain location=484-703; Score =337.2; E_value=2.8e-98; Accession=PF02138.8; Description=BeigeBEACH domain
  Pfam annotation: Domain name=WD40; Domain location=725-763; Score =40.4; E_value=6.3e-09; Accession=PF00400.22; Description=WD domain, G-beta repeat
  Pfam annotation: Domain name=WD40; Domain location=790-828; Score =21.9; E_value=0.0023; Accession=PF00400.22; Description=WD domain, G- beta repeat
  Pfam annotation: Domain name=WD40; Domain location=915-952; Score =8.6; E_value=3.6; Accession=PF00400.22; Description=WD domain, G -beta repeat
  Pfam module annotation: Pfam domain module=Beach::WD40::WD40::WD40; Domain location=484-703::725-763::790-828::915-952
MGAEMGRRAPRRRSDPEQANTCSREDDKDEDIRLCVDSNGNCDDRLPRRTVRAVDGTRTPLTGGAEIPLRLTDGFIGVQAANEVKHMKAVQADRLKKLQDLRMKLNECSATEIKLAQAIEDEIHLTITAVLSADDNRKTACQLAFREDQQIIRDKWIHISRALMDERGPWSANPFPNDVVTHWKLDKTEDRWRRRFKFKRNYKFDERLCQPSQSRNESTATLADQLYISAKITQKMKQFLVKGVRGITEDSSYEQFEDTNDASESSQSNPSESQNLNNAADTSDHHASAHYKKEPSSTNGDNDYTKVLCSVRCVFVTPKRKLAGQLDITRTVMHFSFEFLVEGTGGSSVFSKFKDKKDSDCKNELGGVDRLDGCRDSMIETNGVLMQNQSNKIKRHKRWNITKIKGVHWTRYLLQYTAMEIFFDDSTAPIFLNFSSQKDTKNAGTLLVSLRNEALFPKGSTKDKNNIISFVDRRVGLEMAENARERWKRREISNFEYLVILNTLAGRSYNDLTQYPIFPWVLADYTSEKLDFNKSSTFRDLSKPVGALDENRFKGGKFDHADRLFQSIESAYINSLSNTSDVKELIPEFFYMPEFLENSNSYHLGVKQDGEPIGDVALPPWAKGSPEEFIHINREALESEYVSSNLHNWIDLIFGYKQRGQPAVEEHSFGIGSDVISPRKIGTFLAENVKFGRQFLATMQNSRDNYLILCGNWENSFQIISLSDGRIMQSIRQHKDVVSCVAVSSDGNVVATGSYDTTVMIWHAFRGRPIDKKIRGANFELSEKEQVIVERPVHILCGHDDIITCLFVSTELDIVISGSKDGTCIFHTLREGRYVRSIQHPSGVGLSKLVASQHGRVVLYSENDLSLHMYSINGRHIASSATLGRLNCIELSCSGDFIVCAGELGQIVLRSMHSLGIVWRYDGNGKTITSLAVTPEECILAGTKNGSLLVFSTETSLLRRGSMQRNKIKPSTSG

SEQ ID NO: 82163 - protein, 141 aa, Zea mays
  Coding DNA Sequence Number=SeqID_40384
MGALCSAACCSLLGSPAPYSKDAWWMAETGPAPGGGGCLQPCTTDEQIGTWDLGGSLALAARVRNWETRESERETDRDSKTPSEALALASLIDDEKKLGDCQFDLWKQYYVTTCVAVFGKLRRSRRLDAVQSDCIALSIFK

SEQ ID NO: 82164 - protein, 143 aa, Zea mays
  Coding DNA Sequence Number=SeqID_40385
  Homolog annotation: Hit_ID=Q6QP51; Match level="QueryCoverage=88%, HitCoverage=51%, E-value=1e-16, Identity=46%"; Hit description =Putative growth-regulating factor 1
  Subcellular localization annotation: CTP_CleavageSite=33; ConfidenceScore=5.36e-01
MALSPFLLAKRRRRGENSAARPSPTAVPPARVRLTTAESSLRRNRKLRLTRPWASAASLDPRARPQPRPRKGVSASPDPRGRPPPQPRKVVSASPDPRARPRPRPREESRPRLTSASGGVSASPDLGLGPIAPQRIHHYPTPS

SEQ ID NO: 82165 - protein, 139 aa, Zea mays
  Coding DNA Sequence Number=SeqID_40386
MLASSGALLLPLVPWHEQTFDDLMSFLGLLLGAINHDDNIICLGVMTYNVEFSNPTFSPLDRVMQLCASVVNGAELGQPHPGGWHSSRSGASDAVFPVRLVSERAKRLRSLRPRRLRHVCHDKVSGDPRIECACDTVGW

SEQ ID NO: 82166 - protein, 209 aa, Zea mays
  Coding DNA Sequence Number=SeqID_40387
  Homolog annotation: Hit_ID=Q6QP51; Match level="QueryCoverage=56%, HitCoverage=52%, E-value=3e-09, Identity=52%"; Hit description =Putative growth-regulating factor 1
MGLINIYYMTVPAGVPAGAINPRVAGLGNIRYPSRVAGAGKQHYSPCSDYCANHKGKTNNSKSRPLPSSASGATGSSASPDPWPRPQPQPREKVSASPDPRPRPREKVPASPDLSLGLGRSHNLTRPQPRPQEKSPPRPTSASDRLRYRGYIITLPLASRLRLRRNKTGVTSRLLRQQVMMVPCMRQQDPGPHRQLRFYRAQALLRRPR

SEQ ID NO: 82167 - protein, 167 aa, Zea mays
  Coding DNA Sequence Number=SeqID_40388
  Homolog annotation: Hit_ID=Q5VRS4; Match level="QueryCoverage=23%, HitCoverage=12%, E-value=9e-10, Identity=87%"; Hit description=Basic helix-loop-helix protein SPATULA-like
  Pfam annotation: Domain name=HLH; Domain location=108-150; Score =19.1; E_value=0.0013; Accession=PF00010.16; Description=Helix-loop -helix DNA-binding domain
  Subcellular localization annotation: CTP_CleavageSite=63; ConfidenceScore=5.09e-01
ENNTIHPVRTTVPTTRVRLTTLSTKAKKRQQDPGPHRQLRFYKAQALLRQPQTSSVKFTSRLRVLAGPKCRHYHCSKNSVTKRQTKKSLTASIYARSIQGYKQLPLKGKLLRRSKIKEKMKALQSLIPNSNKIDKASMLHEAIEYPKTLQYISFYGISNKTLVTPFS

SEQ ID NO: 82168 - protein, 164 aa, Zea mays
  Coding DNA Sequence Number=SeqID_40389
  Homolog annotation: Hit_ID=Q6ERC2; Match level="QueryCoverage=38%, HitCoverage=15%, E-value=3e-20, Identity=76%"; Hit description =Cytidine/deoxycytidylate deaminase-like protein
MAWELIEVPGNLNPSLKDSSVDVVAAKIDPKLANTLIRQLSQVCPLENLRHVKRVRRRTECGDCNYRDAFTDLARNSQRPRRACYNGPERTWASELDEAALWDDFVAGLRLVPIKRRVSPPVLSLSDQRLSAKTSSEGWRLCLRPNICPPRDQFNKVTWCRRRR

SEQ ID NO: 82169 - protein, 165 aa, Zea mays
  Coding DNA Sequence Number=SeqID_40390
  Homolog annotation: Hit_ID=Q6ERC2; Match level="QueryCoverage=37%, HitCoverage=15%, E-value=3e-20, Identity=76%"; Hit description =Cytidine/deoxycytidylate deaminase-like protein
MAWELIEVPGNLNPSLKDSSVDVVAAKIDPKLANTLIRQLSQVCPLENLRHVKRVRRRTECGDCNYRDAFTDLARNSQRPRRACYNGPERTWASELDEAALWDDFVAGLRLVPIKRRVSPPVLSLSDQRLSAKTSSEGWRLCLSPQHLPSEGPVQQSHLVPKDVA

SEQ ID NO: 82170 - protein, 530 aa, Zea mays
  Coding DNA Sequence Number=SeqID_40391
  Gene Ontology: Mol. function=protein binding; Biological process =defense response
  Homolog annotation: Hit_ID=Q8S455; Match level="QueryCoverage=62%, HitCoverage=26%, E-value=1e-159, Identity=86%"; Hit description=Rust resistance-like protein RP1-2
  Pfam annotation: Domain name=LRR_1; Domain location=232-254; Score =9.9; E_value=4; Accession=PF00560.23; Description=Leucine Rich Repeat
  Pfam annotation: Domain name=LRR_1; Domain location=277-300; Score =1.1; E_value=1.8e+02; Accession=PF00560.23; Description=Leucine Rich Repeat
  Pfam annotation: Domain name=LRR_1; Domain location=405-431; Score =7.1; E_value=13; Accession=PF00560.23; Description=Leucine Rich Repeat
  Pfam module annotation: Pfam domain module=LRR_1::LRR_1::LRR_1; Domain location=232-254::277-300::405-431
MEGEIRGCHWDTLRALLPIYQAISSSQVGDGCSTDFWHDAWSGPDDLSTAFPALYSHCIRQKVCVREVVLQGLHLVPRLTPQAREELEDVLTIVNNTSLADRPDTRHCFLADHTGNFQTSTLYNLLKGSLGHGDKKQGYELRQLKDLNELGGSLRVENLENVIGKDEAVESKLYLKSRLKELALEWSSENGMDAMDILEGLRPPPQLSKLTIKGYRSDTYPGWLLERSYFENLESFELSNCSLLEGLPPDTELLRNCSRLRINFVPNLKELSNLPAGLTDLSIDWCPLLMFITNNELGQHDVRENIIMKADDLASKLALMWEVDSGEEVRSVLSKDYSSLKQLMTLMMDDDVSKHLQIIESGLEEREDKVWMKENIIKAWLFFHEQRIRFIYGRTMEMPLVLPSGLCELSLSSCSITDEALAICLGGLTSLRNLRLKYYMALTTLPSEKVFEHLTKLVWLVAPRCHPNTTLSPLEAPEFRIKSEANGSANVVVPALQAPGNSFFLNNKYAESPRGLVSSCLLYFVDRMGI

SEQ ID NO: 82171 - protein, 679 aa, Zea mays
  Coding DNA Sequence Number=SeqID_40392
  Gene Ontology: Mol. function=protein binding; Cellular component =membrane; Biological process=defense response
  Homolog annotation: Hit_ID=Q8S455; Match level="QueryCoverage=48%, HitCoverage=26%, E-value=1e-160, Identity=86%"; Hit description=Rust resistance-like protein RP1-2
  Pfam annotation: Domain name=LRR_1; Domain location=381-403; Score =9.9; E_value=4; Accession=PF00560.23; Description=Leucine Rich Repeat
  Pfam annotation: Domain name=LRR_1; Domain location=426-449; Score =1.1; E_value=1.8e+02; Accession=PF00560.23; Description=Leucine Rich Repeat
  Pfam annotation: Domain name=LRR_1; Domain location=554-580; Score =7.1; E_value=13; Accession=PF00560.23; Description=Leucine Rich Repeat
  Pfam module annotation: Pfam domain module=LRR_1::LRR_1::LRR_1; Domain location=381-403::426-449::554-580
MEGEIRGCHWDTLRALLPIYQAISSSQVGDGCSTDFWHDAWSGPDDLSTAFPALYSHCIRQKVCVREVVLQGLHLVPRLTPQAREELEDVLTIVNNTSLADRPDTRHCFLADHTGNFQTSTLYNLLKGSLGHGDVSTTFIWGNKAPPRAQFFCWLLMQGKIQCKWNLKKKGIVDDDCCEICNQDSETPSHIIFHCPFARQFWSSIGFSVADDLGTQDLPNISRPDRLPGAEFNSFVLLCCWQLWKRRNGVVFRQDHATLAATLHSCASEAKAWAYRHNRKEAQKKQGYELRQLKDLNELGGSLRVENLENVIGKDEAVESKLYLKSRLKELALEWSSENGMDAMDILEGLRPPPQLSKLTIKGYRSDTYPGWLLERSYFENLESFELSNCSLLEGLPPDTELLRNCSRLRINFVPNLKELSNLPAGLTDLSIDWCPLLMFITNNELGQHDVRENIIMKADDLASKLALMWEVDSGEEVRSVLSKDYSSLKQLMTLMMDDDVSKHLQIIESGLEEREDKVWMKENIIKAWLFFHEQRIRFIYGRTMEMPLVLPSGLCELSLSSCSITDEALAICLGGLTSLRNLRLKYYMALTTLPSEKVFEHLTKLVWLVAPRCHPNTTLSPLEAPEFRIKSEANGSANVVVPALQAPGNSFFLNNKYAESPRGLVSSCLLYFVDRMGI

SEQ ID NO: 82172 - protein, 380 aa, Zea mays
  Coding DNA Sequence Number=SeqID_40393
  Gene Ontology: Mol. function=helicase activity
  Homolog annotation: Hit_ID=Q5NA16; Match level="QueryCoverage=54%, HitCoverage=44%, E-value=4e-28, Identity=34%"; Hit description =Helicase-like protein
  Pfam annotation: Domain name=Rep_fac-A_C; Domain location=153-273; Score=-70.1; E_value=0.093; Accession=PF08646.1; Description =Replication factor-A C terminal domai
MWGKGTPIHAEIAAALAVDKGSLIEIEKVYELKRFRVTPSRNYFKPVDNNFMIQFTLYIQAKLATTQQSSETSSSRIQGQPYLSGTTTSSWYFNPGIPEAQTYRNGLQNNDLQLIQPTTAEEEIQLSQPPNLEHKTVEELLNIDPDMFPPEGYKCTVTISRIVQNSKWWYPPCSRCHKSSSQTSTGYHYTSCGCTNINFRYKLSFIATDGTCEEELFCFDNIARKIVGKPCDNLVIAVTTSQGPTAALATIMCLKFTLAVSINMSAYSVTNRVFFIMSILTNHGRQTFIPSNMPSHPQQELHTQDEIPSLPTTQDSPATSMVKLSTCSNERNEGDDQRISELNNQELSSPPKRINIATLAKAYQILQTPKRKPPRSSSTS

SEQ ID NO: 82173 - protein, 343 aa, Zea mays
  Coding DNA Sequence Number=SeqID_40394
  Gene Ontology: Mol. function=helicase activity
  Homolog annotation: Hit_ID=Q5NA16; Match level="QueryCoverage=60%, HitCoverage=44%, E-value=3e-28, Identity=34%"; Hit description =Helicase-like protein
  Pfam annotation: Domain name=Rep_fac-A_C; Domain location=116-236; Score=-70.1; E_value=0.093; Accession=PF08646.1; Description =Replication factor-A C terminal domai
MGTPIHAEIAAALAVDKGSLIEIEKLATTQQSSETSSSRIQGQPYLSGTTTSSWYFNPGIPEAQTYRNGLQNNDLQLIQPTTAEEEIQLSQPPNLEHKTVEELLNIDPDMFPPEGYKCTVTISRIVQNSKWWYPPCSRCHKSSSQTSTGYHYTSCGCTNINFRYKLSFIATDGTCEEELFCFDNIARKIVGKPCDNLVIAVTTSQGPTAALATIMCLKFTLAVSINMSAYSVTNRVFFIMSILTNHGRQTFIPSNMPSHPQQELHTQDEIPSLPTTQDSPATSMVKLSTCSNERNEGDDQRISELNNQELSSPPKRINIATLAKAYQILQTPKRKPPRSSSTS

SEQ ID NO: 82174 - protein, 110 aa, Zea mays
  Coding DNA Sequence Number=SeqID_40395
  Subcellular localization annotation: CTP_CleavageSite=51; ConfidenceScore=5.10e-01
MASGIDLEGSQMSSVPLPADDLHRRVAGTVGRLDVGALTQPSMRPERGCISLVSVRSFFLLVSDCPWFSQPRFFFRLQELGFTTSFVPVPGGTGGTRPAEGFFLDGGVGL

SEQ ID NO: 82175 - protein, 298 aa, Zea mays
  Coding DNA Sequence Number=SeqID_40396
  Gene Ontology: Mol. function=protein binding; Biological process =defense response
  Homolog annotation: Hit_ID=Q6Z635; Match level="QueryCoverage=73%, HitCoverage=26%, E-value=1e-10, Identity=28%"; Hit description =Putative MLA1
MTGVEPAIIGAIAKLAAPVLPIAIKGIQGALKKRQVRDSDVETLKSQLSYIQGIIRDTRKTIRSSQDPSDRLQSCAGYLRCLAYDIEDLIEGRRAGTMTGAKLNGKITIIQDLIRCVESYPEFMAVPTNEAPSQGAASSSTTSSAQLVVPNSNPQTAGRGFPLADLVGKEDLDELLDLLVRRPDNELDMVLNKVMVISVVGFCGIGETKLCHTVYTDVQESRKFSLHAYVIVSAAGKDCSIVLEEIIEQFRLQEDPQDSSGGFFHRYFVVVDGVESEELVDGIASAFPDNSMGSRIIM

SEQ ID NO: 82176 - protein, 354 aa, Zea mays
  Coding DNA Sequence Number=SeqID_40397
  Gene Ontology: Mol. function=protein binding; Biological process =defense response
  Homolog annotation: Hit_ID=Q6Z635; Match level="QueryCoverage=71%, HitCoverage=30%, E-value=9e-11, Identity=28%"; Hit description =Putative MLA1
MTGVEPAIIGAIAKLAAPVLPIAIKGIQGALKKRQVRDSDVETLKSQLSYIQGIIRDTRKTIRSSQDPSDRLQSCAGYLRCLAYDIEDLIEGRRAGTMTGAKLNGKITIIQDLIRCVESYPEFMAVPTNEAPSQGAASSSTTSSAQLVVPNSNPQTAGRGFPLADLVGKEDLDELLDLLVRRPDNELDMVLNKVMVISVVGFCGIGETKLCHTVYTDVQESRKFSLHAYVIVSAAGKDCSIVLEEIIEQFRLQEDPQDSSGGFFHRYFVVVDGVESEELVDGIASAFPDNSMGSRIIMGMRTAVGRDADRCVGHRHKMWPLEDKQSVVRFLNEAERRRRHEQDLSDFAADSKFY

SEQ ID NO: 82177 - protein, 91 aa, Zea mays
  Coding DNA Sequence Number=SeqID_40398
MRNTLRPVDPGDIYPPHPPTGGGAELWLPDEFLDNDFFSEEEKAAVATRSESNEEEEGADDLPRRLVGLVVGNGKGDGSLANVSVFDFAEL

SEQ ID NO: 82178 - protein, 189 aa, Zea mays
  Coding DNA Sequence Number=SeqID_40399
MAPLHGGFSAGKSSLCCDLLARRCGPSGLAPIWSFTPLVDPGDIYPPHPPTGGGAELWLPDEFLDNDFFSEEEKAAVATRSESNEEEEGADDLPRRLVGLVVGNGKGDGSLANVGGGVGRLIAVDFVRPPLERPPMNPWDVLNEAAGQVACLRTNSTPVPTNDVVANQGLPVTPPAEKLSAPAEAAKAN

SEQ ID NO: 82179 - protein, 161 aa, Zea mays
  Coding DNA Sequence Number=SeqID_40400
MARHTLEDFLRQGGGLTGDVLMEPAICTCMDGSYPLRGKHYHEMINPFRVLTDVSYIHVFQVKKLMKEKKNDARISEYIDINKELQEESCPTQGSMKKIACNIRFVWGVRIFVTLKAEDPKEREHLRKILSGAAPKLLPIELRHSDRSQDEGANQLKDGLT

SEQ ID NO: 82180 - protein, 159 aa, Zea mays
  Coding DNA Sequence Number=SeqID_40401
  Subcellular localization annotation: CTP_CleavageSite=66; ConfidenceScore=5.41e-01
MAMRDLLEMSLLHASITSCRPPSFHAPSRKSSFPPPFPPNAPLLFSRAELDLASDSFTAPSQGVVMGDGVVVPATVRRGLTGDVLMEPAICAFMHGSYPLSGKHYHVKKLIKEKKNDARISEYIDINKELQEVYGTMIHLRVSDSYVLSQGQDGKSFCC

SEQ ID NO: 82181 - protein, 143 aa, Zea mays
  Coding DNA Sequence Number=SeqID_40402
MYSREKEEGRHGKLGCRGLLAMERGRRGKWSRLEQREYGVQGARRHGEREEIPAAGARKNGVHAMAAERLLQGSSTSIQAGRWRPAPMEKRACWGRDELGAMDQSSPTPWLADGEELLRAGCCVWEKKAGKRKWRLGKMQGWE

SEQ ID NO: 82182 - protein, 143 aa, Zea mays
  Coding DNA Sequence Number=SeqID_40403
MYSREKEEGRHGKLACRGLLAMERGRRGKWSRLEQREYGVQGARRHGEREEIPAAGARKNGVHAMAAERLLQGSSTSIQAGRWRPAPMEKRACWGGDELGAMDQSSPTPWLADGEELLRAGCCVWEKKAGKRKWRLGKMQGWE

SEQ ID NO: 82183 - protein, 114 aa, Zea mays
  Coding DNA Sequence Number=SeqID_40404
  Subcellular localization annotation: CTP_CleavageSite=41; ConfidenceScore=5.69e-01
MASNPLQPSFPWRPSSLSLLYMAPCSSPTFPLPRHILSRIYSTRQQQPWRPFSLRSDAAPKAAAPSATSSTPQPSTSRSSSDALRCVALAKSDHPSSICAALCAVVETHVVYVI

SEQ ID NO: 82184 - protein, 96 aa, Zea mays
  Coding DNA Sequence Number=SeqID_40405
  Subcellular localization annotation: CTP_CleavageSite=72; ConfidenceScore=5.51e-01
MASIFSALRRRSKGSSPVSDVVDPATVDLAQQQRRPPLRRTRQVRPPVVDLRSPVCRRRNPRPLSLSRFTRRFSTESQTDMHACATPLGFRPGCSP

SEQ ID NO: 82185 - protein, 91 aa, Zea mays
  Coding DNA Sequence Number=SeqID_40406
MRLGVPFIAPRQLGAVGDQLGRQFLPSIEWCTGQSETIDQAKDGGKKRFEVPSAREKVKETRNPKPGVKKKTCKVKVDRVKKSYGASRITT

SEQ ID NO: 82186 - protein, 149 aa, Zea mays
  Coding DNA Sequence Number=SeqID_40407
MKTQVVTTQRQLMRDLEVLPLEEATTSAKSMNVNGACQRGKLLRFLEQVVVMVVAVDVDEVLGSFLAALNKFVVDRCLWNHSVSKYHVYEFFKDAIKNHTLEWFGKYYRGLFDQIHFGNHFALEGHSGFRRRPDAHFLGDSSDHIYGAV

SEQ ID NO: 82187 - protein, 231 aa, Zea mays
  Coding DNA Sequence Number=SeqID_40408
MKTQVVTTQRQLMRDLEVLPLEEATTSAKSMNVNGACQRGKLLRFLEQVVVMVVAVDVDEVLGSFLAALNKFVVDRCLWNHSVSKYHVYEFFKDAIKNHTLEWFGKYYRGLFDQIHFGNHFALEGHSGFRRRPDAHFLGDSSDHIYGAVRARYNGPDRTWASELDEAALWDDFVAGLRLVPIKRRVSLPVLSVRPAAAAKTSSEEWRLCLRSNICPPRDQFDKVTWCRRRR

SEQ ID NO: 82188 - protein, 123 aa, Zea mays
  Coding DNA Sequence Number=SeqID_40409
  Gene Ontology: Mol. function=calcium ion binding
  Homolog annotation: Hit_ID=Q7XDE0; Match level="QueryCoverage=62%, HitCoverage=14%, E-value=4e-09, Identity=47%"; Hit description=EF hand family protein, expressed
MTVGGGCLSYGAPDSPLKYNKTGRENDCLPRVGHWNMMNKGPTRRDATALDPEQVQLVELALGALRENSIADVLYLQWLVLPETTKLLGSIAIGLKTKDGVVLAIEKRVTSPTAGTESLLIWS

SEQ ID NO: 82189 - protein, 185 aa, Zea mays
  Coding DNA Sequence Number=SeqID_40410
  Homolog annotation: Hit_ID=Q7XDE0; Match level="QueryCoverage=25%, HitCoverage=9%, E-value=9e-09, Identity=63%"; Hit description=EF hand family protein, expressed
MGLSSCCLMSSTPFQGPTRRDATALDPEQVQLVELALGALRENSIADVLYLQWLVLPETTKLLGSIAIGLNTKDGVVLAIEKRVTSPLLEMCGFDEEAKSYKDPSAIELVLMPWRYSTGYVLFVINHANKFVSVFNFTPTPEWCKDIPLKRFWEVILLISKKYKVAYGVKRIGWSHDIYMWRHSI

SEQ ID NO: 82190 - protein, 112 aa, Zea mays
  Coding DNA Sequence Number=SeqID_40411
MKDIPSSLQHTIIKGESYEIKIEMISNYKCTFGLKEAPLRIASALCQPSYSLCFSYCGSDPSPKSMVPEFVDEDLPEQQPGGLGHLPEYLSCSGGDDGNMEDFEEFQDYDEF

SEQ ID NO: 82191 - protein, 136 aa, Zea mays
  Coding DNA Sequence Number=SeqID_40412
MKVMKDIPSSLQHAIIKGKSYRISFLFYYHGKIEMISDYKCTFGLKEAPLRIASALRQPSYSSCFSQCGSDPSLKDLWKTKAPNRNDLEITKVQDMHHGKDQGMTRVKVITDKHNQGCILDKTCEASKKGKQSMVK

SEQ ID NO: 82192 - protein, 140 aa, Zea mays
  Coding DNA Sequence Number=SeqID_40413
  Gene Ontology: Mol. function=protein binding; Cellular component =endoplasmic reticulum; Biological process=ER to Golgi vesicle -mediated transport
  Homolog annotation: Hit_ID=Q4SUD3; Match level="QueryCoverage=61%, HitCoverage=33%, E-value=1e-10, Identity=39%"; Hit description =Chromosome undetermined SCAF13964, whole genome shotgun sequence
MARILSLKSLNAFPHAEEHLSKKTYSGAVVTILGLLIMITLFVHELQFYLTIYTVHQFLLIIIDEIMPCEVLSVDAIDMSGKHEVDLHTNIWKMLEFERAFIDFYNSILHKNETVLQIWTLMVFSTLGKLEETFELTFFC

SEQ ID NO: 82193 - protein, 132 aa, Zea mays
  Coding DNA Sequence Number=SeqID_40414
  Gene Ontology: Mol. function=protein binding; Cellular component =endoplasmic reticulum; Biological process=ER to Golgi vesicle -mediated transport
  Homolog annotation: Hit_ID=UPI0000660A89; Match level="QueryCoverage =87%, HitCoverage=27%, E-value=4e-16, Identity=39%"; Hit description =Homolog of Brachydanio rerio "Similar to serologically defined breast cancer antigen 84.
MARIPSLKSLNAFPHAEEHLLKKTYSGAVVTILGLLIMITLFVHELQFYLTTYTVHQFLLIIIDEIMMSVDLKRGETLPIHVNMSFPSLPCEVLSVDAIDMSGKHEVDLHTNIWKMQKICTFTGFDLCLGAV

SEQ ID NO: 82194 - protein, 73 aa, Zea mays
  Coding DNA Sequence Number=SeqID_40415
VTARGRTFGPKDPSSDRACPRTATPEASSATDRAQVLWKGTPGRVRAPSGPDPVAPRGAVNESGCLGMQPKSG

SEQ ID NO: 82195 - protein, 243 aa, Zea mays
  Coding DNA Sequence Number=SeqID_40416
  Homolog annotation: Hit_ID=Q6CQF2; Match level="QueryCoverage=15%, HitCoverage=45%, E-value=8e-08, Identity=72%"; Hit description =Kluyveromyces lactis strain NRRL Y-1140 chromosome D of strain NRRL Y- 1140 of Kluyveromyces lactis
MERSQNDTEARDVGRHGCSALRLGRKRGVRPWRRGRKGTLELRENDTEACGMAVRPCVWAENEGTVERRENDTEARDEPRLGHGGAGRRAAGLFVLAFGLKTSVTARGRTFGPKDPSSDRACPRTATPEASSATDRAQVLWKGTPGRVRAPSGPDPVAPRGAVNESGCLGMQPKSGGFELEHACRDPKDGELCLSGAKPEETLVEARSDTDDSWSPHEFYRVKPMIRGIGGATPSTYSQTLNR

SEQ ID NO: 82196 - protein, 63 aa, Zea mays
  Coding DNA Sequence Number=SeqID_40417
MNPCFLLQTPNKLHEQEAFALSSLIDDEKKLGDSPEVTQRRIDNSDQFVILATVRVAFVPACL

SEQ ID NO: 82197 - protein, 137 aa, Zea mays
  Coding DNA Sequence Number=SeqID_40418
MNPCFLLQTPNKLHEQEAFALSSLIDDEKKLGDWPAKRCLVGRTEEHRRCALAHIADRPHPNAAPLPTPVSSLRRHPGDKNRRSPASRRSPVILPSAKGVGRRRGGGGEMWTRGGSRTQAAQELGVFGRGEMWQRSD

SEQ ID NO: 82198 - protein, 42 aa, Zea mays
  Coding DNA Sequence Number=SeqID_40419
MADKRKPRQGGEPFGVCPFRSSSETCYVSKSSSTGQIEVRSY

SEQ ID NO: 82199 - protein, 152 aa, Zea mays
  Coding DNA Sequence Number=SeqID_40420
  Gene Ontology: Mol. function=cysteine-type peptidase activity; Biological process=proteolysis
MERFPQIDWCHLIFSDLCEAAQKWHNRSINNVSTTIYGCSIVVLLYYLDHLHHAAAPNNKIGTPRIKYFNKNIIRVLSMADKRKPRQGGEPFGVCPFRSSSETCYVSKSPSTGQIESPMRPESVDEDPNQHGRLPNIIIQLPLMQDLMANKI

SEQ ID NO: 82200 - protein, 327 aa, Zea mays
  Coding DNA Sequence Number=SeqID_40421
MGSSLSPSSVAALTTAAHGHRYHLSSSSSSDYYEDDGFEFTPLLPRPRRRHSARTERPRTVAQAAATTAAQPQPPQLRARRGAPSVVAATPAAPPTPRKQQVRWHDMAFGSARVPAAMDMGEIRRRLRARQLALAGGPAGNERPPSSAAGWAPWRLIRSLSCKGLEPVAAAAAPVRLAVLVRPVKAESAAPADVRYPGEGSGSRGGEKSGGAVVPSLATSIHLGEGASRRCSSAATAKLGSKRPCSSGSGGGPLSVAGGKEVGVDDSKIQGAGATVGVRRRRTTIAKKLRRSTTPMKEGGEKRKRISTPPSSSSSIRSGGPDPKKKR

SEQ ID NO: 82201 - protein, 326 aa, Zea mays
  Coding DNA Sequence Number=SeqID_40422
MGSSLSPSSVAALTTAAHGHRYHLSSSSSSDYYEDDGFEFTPLLPRPRRRHSARTERPRTVAQAAATTAAQPQPPQLRARRGAPSVVAATPAAPPTPRKQQVRWHDMAFGSARVPAAMDMGEIRRRLRARQLALAGGPAGNERPPSSAAGWAPWRLIRSLSCKGLEPVAAAAAPVRLAVLVRPVKAESAAPADVRYPGEGSGSRGGEKSGGAVVPSLATSIHLGEGASRRCSSAATAKLGSKRPCSSGSGGGPLSVAGGKEVGVDDSKIQGAGATVGVRRRRTTIAKKLRRSTTPMKEGGEKRKRISTPPSSSSSIRSGGPDPKKK

SEQ ID NO: 82202 - protein, 137 aa, Zea mays
  Coding DNA Sequence Number=SeqID_40423
MAALRTIDPYSYLDLSVLSKVGHLDQFYVIYLSQKFYLTFLSVYFLVLQFYSHSCACDVLCRWLVLDALHALLEHYSITERDTAETAMQDAARRVLSQYCSLFSGVADGLDLKYYPRRSTNSAGDVISHPLVREIPG

SEQ ID NO: 82203 - protein, 372 aa, Zea mays
  Coding DNA Sequence Number=SeqID_40424
MVRHARTVTGRISPTLCLGIDNEQPAVHECVAEDLPEQQPGDSGHFPEYLSFYSHSCAYDVFCRWLVLDALHVSPATWRDCKVTCTRSRSADARSRSNRTLPLASVGGGVWEAAFPSTSARDAPCTTTGHPAAGGDRDGDDDDDDAGGSSSHSTELSKEQEPKGWIARPITHDTARGCHFHDALDTLLRRAFDRHTWSIEYHCVVYQHRRELYPDQWEATCLMHRPDNDLWGVEAFSEHYSITERDTAEAAMQDAARRALSQYFSLLSGVANDLDPKYYPRRSTDSAGGVIVSPVGEGNPRLNIIVNLVVVLNTELDHALDELGKMSENRRRGARRVQHEQQAPQEEVAQQQLPLPPPMTTEHMFLMHTQAV

SEQ ID NO: 82204 - protein, 137 aa, Zea mays
  Coding DNA Sequence Number=SeqID_40425
MARVARTLLATDRLKGVVYSRVARTCSCSGGSVGIVDIKVYEKHMSCVLNGSTLKERYTNLENVIYLGVYVLALELDMPIEDHALIRLAQADIPNSSLLVLDNHIIVLSTQPRKGMSHHFHEFDAFDFLISIEGIST

SEQ ID NO: 82205 - protein, 83 aa, Zea mays
  Coding DNA Sequence Number=SeqID_40426
MARVARTLLATDRLKGVVYSRVARTCSCSGGSVGIVDIKVYEKHMSCGHSFVLLMMVLSAGGLGLLISLSNPSILLNEDGHLN

SEQ ID NO: 82206 - protein, 55 aa, Zea mays
  Coding DNA Sequence Number=SeqID_40427
MGRLELRAEWKSRLVGKVCDLCRVLETGISVVLTCSGGDVGNMEDFEEFQDYDEF

SEQ ID NO: 82207 - protein, 91 aa, Zea mays
  Coding DNA Sequence Number=SeqID_40428
MGRLEPRAEWESRLVGKVCDLYRVLETGISVVLTMLDLGMSTTSDVTKCKECIVLATPPAKSQMEQFKKVHAQFLQATSQVVARLQQVDLA

SEQ ID NO: 82208 - protein, 61 aa, Zea mays
  Coding DNA Sequence Number=SeqID_40429
MGTNGHLNLDTGGFQANPKEVHCWDHASSPKVVQEEAASAEAVCTRYRRMQFMKLRKCKPT

SEQ ID NO: 82209 - protein, 244 aa, Zea mays
  Coding DNA Sequence Number=SeqID_40430
MGLGVCGLLCQGGNENDGFGIGYGKVRLRRRRQTPPHLRTCGPSGPSGREPEPCARSRTVRACAESTAAGSQRSDWSLDLHQHTFWQLHWGKVSRSTKNQALKWPVLKITPISPKTISWSRLLKVLTVDEQQQYEDYMRQAKEKLLSQYTVDRHQKNVKHGETDIASLPSSLQVPNVSKPDDIQSIKQYVDQQQNQMKQQIGGLEESIRKLTRTLEKSVAPSFPSNETSNRISMSNTSATNGDS

SEQ ID NO: 82210 - protein, 220 aa, Zea mays
  Coding DNA Sequence Number=SeqID_40431
  Subcellular localization annotation: CTP_CleavageSite=45; ConfidenceScore=5.39e-01
MPDPRAVAATTLALVAFTGLWAPVVRFISHAVNFATNPSCTATVRAESAIPARILATDLLGAGIGHRGDSALNHKYGCDSLRLHSRVLRERRAVYAMREKPAAAWISPSWRGCVCRGMAVTSRTVSRGASRPTPGTTVVPKVSLPLPQTQRKKGAPPWPFLTSARSLLLEDSRRGSAYGVGALGKPRLAGGETEGSPAARAPVRRTPPRNGNAHCNIYLT

SEQ ID NO: 82211 - protein, 100 aa, Zea mays
  Coding DNA Sequence Number=SeqID_40432
  Subcellular localization annotation: CTP_CleavageSite=43; ConfidenceScore=5.45e-01
MAVPHMRTVAFARRLTPRICLWRGGSGQATPRRGRNRGMTLVRCSPGGNFAVERPGRVGITGCLGSCSADTTADWERSLLCLPHVRKTKEDRWMRNEEWR

SEQ ID NO: 82212 - protein, 88 aa, Zea mays
  Coding DNA Sequence Number=SeqID_40433
MDREWHNNECMGEVGGDRRKPPGASLASTQWNLRAESRRRRRTSPSTVELPWAEQRGTVEQELGNEGVDLLPWMSTTSKSQGAGQGWS

SEQ ID NO: 82213 - protein, 57 aa, Zea mays
  Coding DNA Sequence Number=SeqID_40434
MDEHNVQEPRRRARMVSLVELVVRKAWVYIYVIVDITPQLITLNQRSKPDKYHKNKH

SEQ ID NO: 82214 - protein, 72 aa, Zea mays
  Coding DNA Sequence Number=SeqID_40435
MATETRRQPESTVADLGGCAENGGERGQRKLEGGRGNWGVSRVADVEAKLTVAEGTAGLRRRRRNGLGTAAV

SEQ ID NO: 82215 - protein, 72 aa, Zea mays
  Coding DNA Sequence Number=SeqID_40436
MAVMLLLLVLLLNWVGIYLYLVIANKILTNFKKQCSALTILFGKPYTSRELPPLVKNRYHMMRRMEDAVASS

SEQ ID NO: 82216 - protein, 60 aa, Zea mays
  Coding DNA Sequence Number=SeqID_40437
MAVMLLLLFYYLIGFGIYLYLVIANKILTNFKSNAQLQPSSLVKNRYRRMRRKEDAVAIS

SEQ ID NO: 82217 - protein, 131 aa, Zea mays
  Coding DNA Sequence Number=SeqID_40438
MGRCMSARMGISSGALLWAWLMFEESLQSTPNTFATSHGGIEGLWSMGIARRRRVVRGIPPCAVVRAPVRIIQGDVVTSILLFNWVGIYLYLVIANKILTNFKSNAQLQPSSLVKDRYRRMRRMEDAVMSS

SEQ ID NO: 82218 - protein, 71 aa, Zea mays
  Coding DNA Sequence Number=SeqID_40439
MENHLGKQWYHKGGVVITFVILHNWVGIYLYLVTANKILTNFKSNAQHQPSSLVKDMYRRMRRMEDVVTSS

SEQ ID NO: 82219 - protein, 179 aa, Zea mays
  Coding DNA Sequence Number=SeqID_40440
  Gene Ontology: Mol. function=binding; Cellular component=integral to membrane; Biological process=transport
  Homolog annotation: Hit_ID=O80413; Match level="QueryCoverage=98%, HitCoverage=48%, E-value=4e-65, Identity=72%"; Hit description =Mitochondrial phosphate transporter
  Pfam annotation: Domain name=Mito_carr; Domain location=67-155; Score= 96.4; E_value=8.6e-26; Accession=PF00153.17; Description =Mitochondrial carrier protein
MALSDRSRESLLPSFLYASSARSFAATGAAARLHASAPAPAAAGAGGAVPFSIQAPNEKIEMYSPAFYAACTVGGIASCGLTHMAVTPLDLVKCNMQIDPAKFKSVSSGFGVLLKEQGARGFFRGWVPTLLGYSAQGACKFGFYEFFKKYYSDIAGPEYAQKYKTLIYLAGSASAEVNC

SEQ ID NO: 82220 - protein, 194 aa, Zea mays
  Coding DNA Sequence Number=SeqID_40441
  Homolog annotation: Hit_ID=O80413; Match level="QueryCoverage=31%, HitCoverage=16%, E-value=6e-23, Identity=83%"; Hit description =Mitochondrial phosphate transporter
  Pfam annotation: Domain name=Mito_carr; Domain location=88-191; Score= -5.4; E_value=0.011; Accession=PF00153.17; Description=Mitochondrial carrier protein
MSRVFDDYYIKDRGVISTPEVTQRMTDSNDHSPSSTKGTSSARSFAATGAAARLHASAPAPAAAGAGGAVPFSIQAPNEKIEMYSPAFYAACTAGGIASCGLTHMAVTPLDLVKCNMQVSGQRPRSVSPGGINGERSEIAEIEAASTSEAARLRAALRRAPPSAFREPHQSFERLTQTCFDKSRAAILQFRTTT

SEQ ID NO: 82221 - protein, 339 aa, Zea mays
  Coding DNA Sequence Number=SeqID_40442
  Homolog annotation: Hit_ID=Q94KS6; Match level="QueryCoverage=31%, HitCoverage=58%, E-value=1e-15, Identity=74%"; Hit description=Beta -expansin 8 precursor
  Pfam annotation: Domain name=DPBB_1; Domain location=220-319; Score =26.4; E_value=5.2e-05; Accession=PF03330.8; Description=Rare lipoprotein A (RlpA)-like double
MTLELMIVVLCSLGKPRLDFFVSSTGHMVVVEDSSFAGIVRSFPGDVSAFVAGASKVTDMKRCPNGYSPSVGTMPKNGVFITPGLEGVFRATWRTRPWAPRRRGGTREEVAHHECELKSAWRTAGAVKSRVDGGELRLRKKCSSERGLDEPEGKKANQGVSRVVDGEAELTRATDATGTQQRSWNGDGLRMRFNEVSSWDLKVEERPGKQPPRRGSPTAVAALVLVLALIAGGHYREAQLDAADAVAVCWALGRGPEPPGMASPTTPAPTTTETVIITDMNYYPMSKYHFDHSGTAFDKLAKPNLNDKLRHSSIIHIEFTRIHRRHWGFESSLVARRHV

SEQ ID NO: 82222 - protein, 448 aa, Zea mays
  Coding DNA Sequence Number=SeqID_40443
  Homolog annotation: Hit_ID=Q94KS6; Match level="QueryCoverage=23%, HitCoverage=58%, E-value=2e-15, Identity=74%"; Hit description=Beta -expansin 8 precursor
  Pfam annotation: Domain name=DPBB_1; Domain location=220-319; Score =26.4; E_value=5.2e-05; Accession=PF03330.8; Description=Rare lipoprotein A (RlpA)-like double
MTLELMIVVLCSLGKPRLDFFVSSTGHMVVVEDSSFAGIVRSFPGDVSAFVAGASKVTDMKRCPNGYSPSVGTMPKNGVFITPGLEGVFRATWRTRPWAPRRRGGTREEVAHHECELKSAWRTAGAVKSRVDGGELRLRKKCSSERGLDEPEGKKANQGVSRVVDGEAELTRATDATGTQQRSWNGDGLRMRFNEVSSWDLKVEERPGKQPPRRGSPTAVAALVLVLALIAGGHYREAQLDAADAVAVCWALGRGPEPPGMASPTTPAPTTTETVIITDMNYYPMSKYHFDHSGTAFDKLAKPNLNDKLRHSSIIHIEFTRIHRRHWGSGPGTSACGRPTVRGRGSPAHSVAPRGVVALGPGSRRVRLSGAARGLCARAAGAHPAWRAAPSSHPLVRPWRPGATARPGEPPQPASAAWRGGAAILGGPACQLAAPHGASRAAWPRCRA

SEQ ID NO: 82223 - protein, 197 aa, Zea mays
  Coding DNA Sequence Number=SeqID_40444
MAALGEASSVCWRRFARAHAVQEARTGAVGEEDGDGRRAQGWMAGALGTSQRCDGEARRHGEEIAGALVWRWDLAGFLERGAGKQGARPWRCWGMGPLERGPGVGSSASEQRGAADRACSLSRAPARAGGRSGHGQRPRESREREKNKNGAAAWRGQNAEGRKKKASRGRELGELEGRNARPWKPLRAGEGASALRA

SEQ ID NO: 82224 - protein, 197 aa, Zea mays
  Coding DNA Sequence Number=SeqID_40445
MAALGEASSVCWRRFARARAVQEARTGAVGEEDGDGRRAQGWMAGALGTSQRCDGEARRHGEEIAGALVWRWDLAGFLERGAGKQGARPWRCWGMGPLERGPGVGSSASEQRGAADRACSLSRAPARAGGRSGHGQRPRESREREKNKNGAAVWRGQNAEGRKKKASRGRELGELEGRNARPWKPLRAGEGASALRA

SEQ ID NO: 82225 - protein, 127 aa, Zea mays
  Coding DNA Sequence Number=SeqID_40446
MGKPVPSLLMLLLSRGRVPLDSPTRWQDGRPSHSSNHVLQGTCKNCATSKAEYTNTKLDLPGEHGSSSLISCEKQTIRIEFLSLQVTALVPTISGMGDLVSGRVRRAICCQVQSGFNNIILIEEKLS

SEQ ID NO: 82226 - protein, 260 aa, Zea mays
  Coding DNA Sequence Number=SeqID_40447
MEETHLHVFDAFCPRPSQASAMARACAYKTLPGLDCTLPRTLKPHWSLARRRLPVRSESAAAQSLCHRRPASGTIPNSGQPSEKTVHTSVRLPEQGIGVCFAGEASPRSPELSTPPEYVDRVNHSTILRFLVYTVAMLPREAHRALGLNQFAVVWPVYSPPTRTPACTHGPGDSGHPRRQAVPRRDRQSLPEPTPPFAGPPSPPQIALLTRPETRSPIPVMVGTSAVTARRPVGVSEALYAKAVYLARIKTRFESSASRS

SEQ ID NO: 82227 - protein, 425 aa, Zea mays
  Coding DNA Sequence Number=SeqID_40448
  Homolog annotation: Hit_ID=Q10P02; Match level="QueryCoverage=24%, HitCoverage=21%, E-value=3e-46, Identity=90%"; Hit description =Aminotransferase, classes I and II family protein, expressed
MSKISRSDEDVVQNGLHLSRSTMVYFKHNDMASLASTLEKLTRGNKRAEKIRRYIVVESIYQNSGQIAPLDEIVRLKEKYRFRVILEESHSFGVLGKSGHGLDEHYGVPITGQLAESEGVAVFKGFDQPKAKGNHDLWEVESVTSSSPVPPLEAPSAPPLGVLAAGVAIGGDPDDGGDDSSSSHNTDLSKEQEPEGWVARHITRDATRRCHFHDALSTLLRQALDRHTWSIEYRRVVFQHSGGVYPDRWEATCLVRRPENSLRGAEVCSEHYSISERDLAEAAMQDAARRALLHYCSVFGGVADGIDLRYYPRRPSGSTGGVVVSPVGEDNPRLSSIVNLATVLNTELDHALDELSRAPAEIAQLRAEHAEHHHLADGSLAPLGLSSRTANHSVGTMPMIQTVQAIGQTLAAMQQVQQQQPPPQP

SEQ ID NO: 82228 - protein, 84 aa, Zea mays
  Coding DNA Sequence Number=SeqID_40449
  Gene Ontology: Mol. function=transferase activity, transferring nitrogenous groups; Cellular component=endoplasmic reticulum; Biological process=biosynthetic process
  Homolog annotation: Hit_ID=Q10P02; Match level="QueryCoverage=68%, HitCoverage=11%, E-value=4e-24, Identity=93%"; Hit description =Aminotransferase, classes I and II family protein, expressed
MPEQRKFKPIDNDEGVHWAVQNGLHLSRSIVVYFKHNDVASLARTLEKLTRGNKRAEKIRRYIVVESIYKIISVFWFDLEYTYV

SEQ ID NO: 82229 - protein, 204 aa, Zea mays
  Coding DNA Sequence Number=SeqID_40450
  Gene Ontology: Mol. function=transferase activity, transferring nitrogenous groups; Cellular component=endoplasmic reticulum; Biological process=biosynthetic process
  Homolog annotation: Hit_ID=Q10P02; Match level="QueryCoverage=94%, HitCoverage=38%, E-value=3e-99, Identity=90%"; Hit description =Aminotransferase, classes I and II family protein, expressed
MSLNASILSLREIDELCDEWETKPLCPPIKEGAKIDAPTLESAAGPHTIVDGKEVVNLASANYLDLIGNEKIIDSCISSLEKYGVGSCGPRGFYGTIDVHLDCESKIAKFLGTPDSILYSYGISTIFSVIPAFCKKGDIIVADEGVHWAVQNGLHLSRSIVVYFKHNDMASLASTLEKLTRGNKRAEKIRRYIVVESIYQAQCF

SEQ ID NO: 82230 - protein, 100 aa, Zea mays
  Coding DNA Sequence Number=SeqID_40451
  Gene Ontology: Mol. function=transferase activity, transferring nitrogenous groups; Cellular component=endoplasmic reticulum; Biological process=biosynthetic process
  Homolog annotation: Hit_ID=Q10P02; Match level="QueryCoverage=60%, HitCoverage=12%, E-value=8e-24, Identity=85%"; Hit description =Aminotransferase, classes I and II family protein, expressed
MSHVFCRYCVYRVRQSRQLPLGLGLGAPSLYGHLIVEGLLIAVIVFQLSTKSYKPLKKPLTEKEIDELCDEWEPELLCPPIKEGAKIDAPTLERYVTLSA

SEQ ID NO: 82231 - protein, 269 aa, Zea mays
  Coding DNA Sequence Number=SeqID_40452
  Homolog annotation: Hit_ID=Q010R1; Match level="QueryCoverage=76%, HitCoverage=21%, E-value=2e-12, Identity=27%"; Hit description=[S] KOG4524 Uncharacterized conserved protein
MLAAWEIWKHQNDCVFEGQRPGVHTVLQVVTNECTLWRLSTELRDKDVYNDGLQRWYMKGEAGQALRQASSAVCMLNELMYGLSGRSLVTNKREVWGFSEQKGTKDNILHCISSILHEYVSPEVWDLPTEKDTELHLIELNLPLHFYRDTTALHTVVLEGIGVLGVLLGQDFALSGFMHSSLYLLLRELISSSAQIRTACDAVLRALATAGGHCSVGQFVVANADYIIDSLCRQLRHLDLNPHVPDVLASMLCYIGASRDILPFLEEPV

SEQ ID NO: 82232 - protein, 831 aa, Zea mays
  Coding DNA Sequence Number=SeqID_40453
  Homolog annotation: Hit_ID=Q010R1; Match level="QueryCoverage=34%, HitCoverage=29%, E-value=6e-12, Identity=25%"; Hit description=[S] KOG4524 Uncharacterized conserved protein
MAAFLRAAPAPALQLCFELIVTSPSALHLFLLSWVFGLVFPLLLLLDAAVQCRKQGNAPGQVAGGIDIGDAVAEAGLTCLEVLLTKCHLTSVNQMVAMLKKLTSGAMLSPSEASEEFRGAIIRCFRALVLQLQPCLDHFCSCKHGIVLPTIPTSTCLEASELEASRGHRGSADVRKESLHTLRILIGKVGSADALAFFLPGIVSRLGKVLYTAKTMISGAAGSSLSIEQAILGLTEALMIVLNDKENLSALGKHKNENHSGGSESTEHILQMLRQLPTKNISDKISHDEITDDSVSNVNNSFADRKALHVKRTKKWLEETTSNVDKLLSATFPHLAIHSSEKVRKAVVSGVKGLLSSCSSTLKRTKMLLLECLCVLACDDAAAVSEAAQDALDHLFNQGHNLVTEKEISDTFTRLVERLPQVVLGSEETTALSHARMLLALTFYAGPQFLINHLHRSPVIAARFFDCLGLCIGHSSQFSGSMDKLIVSKPLSIGYLYSVAELKSGAYSKDTTNISLHATSTSAASKISVIHDNALPNALLGTVEYELPHVPPWFFHAGSQKLYGVLAGIIRLVGLSTVSGEGTAATLSLFVDILLDQFRRLSTELRDKDVYNDGLQRWYMKGEAGQALRQASSAVCMLNELMYGLSGRSLVTNKREVWGFSEQKGTKDNILHCISSILHEYVSPEVWDLPTEKDTELHLIELNLPLHFYRDTTALHTVVLEGIGVLGVLLGQDFALSGFMHSSLYLLLRELISSSAQIRTACDAVLRALATAGGHCSVGQFVVANADYIIDSLCRQLRHLDLNPHVPDVLASMLCYIGASRDILPFLEEPV

SEQ ID NO: 82233 - protein, 141 aa, Zea mays
  Coding DNA Sequence Number=SeqID_40454
  Gene Ontology: Cellular component=intracellular; Biological process =intracellular protein transport
  Homolog annotation: Hit_ID=Q5N7Y5; Match level="QueryCoverage=96%, HitCoverage=24%, E-value=1e-56, Identity=69%"; Hit description =Target of myb1-like
QSKDVVKALKKRIGHKNPKVQLLALTSDPRVKEKVLVLIDTWQDVFGGSHARYPQYYAAYHELVRAGAEFPKRPEKPAPLFNGQSQAARNMRSPDQQEAESSAANDFPALSMSEIHNACGIMDVLAEMLNALDPGNREVPK

SEQ ID NO: 82234 - protein, 95 aa, Zea mays
  Coding DNA Sequence Number=SeqID_40455
MSLKPCTRVGDSPIQTSMHKCLYLPAQLHLAVEECLFGSFRLTTRSCGFLFRHMRGAQPNQQQSKDVVKALKKRIGHRNPKVQLLALSIKHLILC

SEQ ID NO: 82235 - protein, 328 aa, Zea mays
  Coding DNA Sequence Number=SeqID_40456
  Subcellular localization annotation: CTP_CleavageSite=63; ConfidenceScore=5.43e-01
MGSKTLSTKCTFASLTRLRKKTLKDMLAIGNQGRLPRRARRRHATNTTTAKNRGTRRELHGTVASETWTSTNKLTAGPDEELAAGTKGESREGSGSERRPRKEQGWEGLATKNWARAGAVTGEGGCRGTTEKQRPRRSAVRRPHKARLEELGRDGWSRRPWAEAHSDGSRRAMDAQATEKSRGEQGAWGTAAQGEVAKLEGATAEPEPARARISAGRRKEEDRAGCSGESSGRGAAQRGERKEMDARGEHWRAAGARFGLWRSSVGRHGGEQRAPSGARTARRGGGRRSATLGRGNAVEHGPRLEKGKQGAEREMEKSSSGRQLEDED

SEQ ID NO: 82236 - protein, 82 aa, Zea mays
  Coding DNA Sequence Number=SeqID_40457
MGSKTLSTKCTFASLTRLRKKTLKDMLAFGNQDPPQHEPVRPTDDVVLRQRSTPSTILRSTWLVFRITRSINVPHGMHDAHV

SEQ ID NO: 82237 - protein, 79 aa, Zea mays
  Coding DNA Sequence Number=SeqID_40458
  Subcellular localization annotation: CTP_CleavageSite=24; ConfidenceScore=5.23e-01
MGSKTLSTKCTFASLTRLRKNNLKDMLAFGNQVGDRKGSRGVFTIRDTFSEPQSAVVSPSAWSNPGEDTPTDPRYMIQV

SEQ ID NO: 82238 - protein, 370 aa, Zea mays
  Coding DNA Sequence Number=SeqID_40459
MAGFHHPLRLGTVIKFESLEFMSLGIEYDMILLPLVPLECSSSRCHLSRRRRQRQNNRDRAAHGTPCTGGAPGMADGIDSLSKNLANVNIAPRVPPVVPAPTFPASPPPMWETPVPTLLSERCQLQWPSHSSVRRSRKLLGETWRGVRGELSVCNPIAFQPSFDTSSITRMYVGLPFPSGCLDSKEEDGPSFALDFSGLRDPKSMLQFLYVCGEMLSKSSCDRTSQVPGGKHPPPNKFRVLPQAWAPPWSRNNRTQLFHHLQQHGFENPEYGVYFRKSYPSKEKDSQGYVGFWESSCIKPLALLFLYDFWSMTEPRRAHGWNRDSTVTTTRTGGNKHTDIVRKSTQAKALTQLDGFNLNRCLVMAVQGLR

SEQ ID NO: 82239 - protein, 157 aa, Zea mays
  Coding DNA Sequence Number=SeqID_40460
MAEDELGRPCGGEVLAVARAVLAGSVFGGRCCGDGAVGGKGLVRESWGCPEGHDDVWVAVGNGRSRPVHVRRWGSSSADCSVHARPPGNRKSGEDDLGSLVSELAAMAEARAVMAGGGKLVRAKEGRLASEGEHGVSVEHDAAQREVVFKRGLAPNL

SEQ ID NO: 82240 - protein, 49 aa, Zea mays
  Coding DNA Sequence Number=SeqID_40461
MAGGRELVGAKEGRLASEGFCLLVSKIWSPEVWSVSLPEPEANPWFCRV

SEQ ID NO: 82241 - protein, 84 aa, Zea mays
  Coding DNA Sequence Number=SeqID_40462
MGRWISGRDRGTGGGRSTAKRLGGDAKGLRRAIKRSREPKRGRERAEEVPYLKANPRDSSVAAMARRRPGSTVVDLGGCTEDGW

SEQ ID NO: 82242 - protein, 84 aa, Zea mays
  Coding DNA Sequence Number=SeqID_40463
MGRWISGRDRGTGGGRSTAKRLGGGAKGLRHAIKRSREPKRGRERAVEVPYLKANPRDSSVAAMARRRPGSTVADLGGCTEDGW

SEQ ID NO: 82243 - protein, 117 aa, Zea mays
  Coding DNA Sequence Number=SeqID_40464
MCLKSVLVHVLNLKNVGTFELIVQSAQTHAGLKTWFPVVILDHLCRRTYFSKFVQKSPSAIFVGKPRSYDCNLADGEYVLIPEQGAVHEEDQEQAPETAIEDLPAAPAIEGKPRFYA

SEQ ID NO: 82244 - protein, 287 aa, Zea mays
  Coding DNA Sequence Number=SeqID_40465
  Homolog annotation: Hit_ID=Q2R029; Match level="QueryCoverage=41%, HitCoverage=16%, E-value=9e-42, Identity=75%"; Hit description=AAA -type ATPase family protein, putative, expressed
RVMLAFEDNGSSKIGVRLDKQIPDGNDLGGLCEEDHGFFCSAESLRPDFSASEEVERLAMTELIEVLLLFRTMNPVEYEVITLYDKKSFIGVTESLSSLRSKFESLPSGVLIIGSHTQMDSRKEKHKSSSKSSSSSSSESSSSDDEDRGSRKSRSQSRSKRTRKEKKSQSRSKHRGSESEEEGPKRVKNVGTHVLKVKNVGTVELILQSSQTRRVKNVGAHVLKVKNVGTVELIVQSAQTSAGHISLTATPAAAAKTSSEGWCLFLRPNICPPRDQFDKVTWCRRRR

SEQ ID NO: 82245 - protein, 218 aa, Zea mays
  Coding DNA Sequence Number=SeqID_40466
  Homolog annotation: Hit_ID=Q69NN2; Match level="QueryCoverage=52%, HitCoverage=13%, E-value=5e-30, Identity=62%"; Hit description =Hydroxyproline-rich glycoprotein-like
MPFLNVIIALCVQEPVQQVNEGDSLDDGNDDMDEQARSSQHLSSSTTEISLPPSEDSDRMSGQVENDDGLGLVQSDTPVGAAYGDSTQITSTLTAFSAYGHKDPNIHTTNEAQLYGLVEPNVHPQSISFLFSVLQHTWGFSKKSQMSVGQEGHVFTIFCALRVRPPQLLSLTEDWLSYAPSKQVLQKLWAHGVDPQLEPVCIINRKNDKYRISIQIED

SEQ ID NO: 82246 - protein, 154 aa, Zea mays
  Coding DNA Sequence Number=SeqID_40467
  Homolog annotation: Hit_ID=Q69NN2; Match level="QueryCoverage=77%, HitCoverage=14%, E-value=3e-32, Identity=62%"; Hit description =Hydroxyproline-rich glycoprotein-like
MEGLNLICNRRQVTQRIWLPDNPFIICSSQEPVQQVNEGDSLDDGNDDMDEQARSSQHLSSSTTEISLPPSEDSDQMSGQVENDDGLGLVQSDTPVGAAYGDSTQITSTLTAFSAYGHKDPNIHTTNEAQLYGLVEPNVHPQALASSSQLFFVF

SEQ ID NO: 82247 - protein, 667 aa, Zea mays
  Coding DNA Sequence Number=SeqID_40468
  Gene Ontology: Mol. function=transferase activity; Cellular component= membrane
  Homolog annotation: Hit_ID=Q6H4N0; Match level="QueryCoverage=53%, HitCoverage=82%, E-value=0.0, Identity=85%"; Hit description =Putative pectin-glucuronyltransferase
  Pfam annotation: Domain name=Alba; Domain location=64-134; Score =12.2; E_value=0.0013; Accession=PF01918.11; Description=Alba
  Pfam annotation: Domain name=Exostosin; Domain location=298-607; Score=132.6; E_value=1.1e-36; Accession=PF03016.6; Description =Exostosin family
  Pfam module annotation: Pfam domain module=Alba::Exostosin; Domain location=64-134::298-607
MVSPQISHKTLSFLLLSALAAVVLPTTKDEVMSLTKVDFQKEVSQDHDTLVEFYLPWNSYRCCRSNTMNIELEKGGIFVRENCNQLQQQDKGSDEVVLKAMGRAINKIVMTVELIKVLLKTLVLANITGDLIVDCVRMSAPNGWGQNDEAGMSRAYVVLHRWRGGRQQTNKLLRPLHRLGRVASPEWLSSRIYLVSNFGWREKESLVVFIDSEDEITFSLHLNEGSANKSAHSDAINTNWDCSMETKSPLSEFSSTPSRVYSMSLRQQLQDPGRKPVAALHYNKGDKDVSPNGSGLRAPLKDVKNTLSVSKYNKKLVKKDPRCLNHMFAAEIFMHRFLLSSAVRTFNPEEADWFYTPVYATCDLTPSGIPLPFKSPRMMRSAIELIATNWPYWNRSEGADHFFVTPHDSGACFHYQEEKAIGRGILPLLQRATLVQTFGQKNHVCLKGGSITIPPFAPPQKMQAHLIPVDTPRSIFVYFCGLFYDTGNDPEGGYYARGARASVWENFKNNPLFDISTDHPPTYYEDMQHSVFCLCPLGWAPWSPRLVEAVVFGCIPVIIADDIVLPFAEAIPWEEISVFVAEEDVPKLDNILTSIPTDVILRKQCLLANPLMKHAMLFPQPAQAGDAFHQILNGLARKLPHGESVFLKPGERVLNWTAGPPGDLKPW

SEQ ID NO: 82248 - protein, 77 aa, Zea mays
  Coding DNA Sequence Number=SeqID_40469
DKGSDEVVLKAMGRAINKIVMTVELIKISTGRGWDLKGQPVLLFYTSYPAGTEMLTNTAKLYKAALGNCFKTYHIGC

SEQ ID NO: 82249 - protein, 289 aa, Zea mays
  Coding DNA Sequence Number=SeqID_40470
  Homolog annotation: Hit_ID=Q84ZW6; Match level="QueryCoverage=27%, HitCoverage=5%, E-value=1e-10, Identity=50%"; Hit description =Putative ABC transporter
  Pfam annotation: Domain name=Alba; Domain location=192-268; Score =2.9; E_value=0.012; Accession=PF01918.11; Description=Alba
MAVSLAPALLFAICTYATWKEIAFAAPNREIRVRYGRDRHQRTLAVVSGAVLAGGALAYARSSQSRRRRRRPEASRSSGAGALAANGDGFSRNGAGGGLAAADQRRSGLKSLHFLAAILLKKIGPSGTRYLLCLVLTLVGSTIFSSVSDVLVQIVLVFTAAFIISSPAPLAMTPLQRFRGLRDPSVTLYADDGGELHTTSSVRALFHLFLPPCRNHGTERKDKGSDEVVLKAMGRAINKIVMVVELIKLLVGMHSMNNALARRGSPEQLDFYRTRLGSQGLMSCFIDGE

SEQ ID NO: 82250 - protein, 196 aa, Zea mays
  Coding DNA Sequence Number=SeqID_40471
  Subcellular localization annotation: CTP_CleavageSite=31; ConfidenceScore=5.19e-01
VHTVVHGSASRSRACPNHHPALATIPARHLRASGRFSRPRSPLYCPRPRDIEGDRLCCAKSRNPRSLWKEISISVRVRCAKSRNPRPKSRNLPPLWKEIASAAPRLSVGIIVCVRCAPTLILSPVLLPRLFPHLCATNQEDARRCLRRGACRWSSGVRPLEPEPPAEEAPGEIRTVLVFTAAFVVSSPVPLAMTPS

SEQ ID NO: 82251 - protein, 97 aa, Zea mays
  Coding DNA Sequence Number=SeqID_40472
MAHRIAQSTCDCGRPKSSEGDPGSPVRLCWVRGLGKLHGPLARLRATGAAVSGWRELAAVVEARAVMAGGGELAGVGVLARGERQSEGQTVAHPGYL

SEQ ID NO: 82252 - protein, 95 aa, Zea mays
  Coding DNA Sequence Number=SeqID_40473
MAGGGELAGVGVLARGERQSEGQTVAHPGHYQSQGKRYHTNGLNKDVSIQQILPPVDKATMQSSRTGKLDKVHQLVPIEQGHDLEWKYDNQNVTD

SEQ ID NO: 82253 - protein, 131 aa, Zea mays
  Coding DNA Sequence Number=SeqID_40474
MVVAPWVKYLSQEYDPMLTWAASTYRSPSCPYFRIHGMNVDEQGASRDRGFDGQGTARSSVSVRTKLRLGGDDTVGDGRSARPWDANSSDGESRGASYTSTVTARLEPERRRGRAARRADGHEHDLVMQFL

SEQ ID NO: 82254 - protein, 68 aa, Zea mays
  Coding DNA Sequence Number=SeqID_40475
MVVAPWVKYLSQEYDPMLTWAASTYRSPSCPSFRYKQNMQRENPLALLKRVLRIVLERNWFSYRTIRF

SEQ ID NO: 82255 - protein, 342 aa, Zea mays
  Coding DNA Sequence Number=SeqID_40476
MSSPELRESSARMLEVTWGRWPKNVPIPRAAGEDFFMSRMARDLRVFPYGRNIVAVVSAVMNKDRQEAAQKRRAVIRLPKARLKRARGTAKATAPDGSQPTLAAKPAAPRSSKVSESVKATGAGGTKSVLAEAAKARELPSPGKCVADFGNNISVDDYLVGSGEGQLVVVPPAVATTVSTAVPGVKGSALSAGGEISVVAAVKDEAGTVSRRLREESQQLSQAADFADRVASGALTADVSAEVERHQAQHADTVREKSAADSKCRKLAEKVAVLEGERTDLRRQLVEERREANQAIAKAQAAQAEAKLARVEESLASQHAEEWEVRFNALEARMERAEASTR

SEQ ID NO: 82256 - protein, 380 aa, Zea mays
  Coding DNA Sequence Number=SeqID_40477
MEAEKTDLRRQLVEERREANQAIAEAQAVLASQRAEELEARFNALRNRVDKAEASTRSEVERTHAQFVDAYRELGAQTADFEVPDREADLRFLEWLQAFVAMVKQSAGALFDRMWGPHGREAVRERSDRAIEQAHAEDVKDLGALVGAPPEAAEVNPVPPLDVGEGSSAAPVPTVAGEDPVSAPASTAEDALKVVAEPAAEDPMAAAEPSQVQGFGPAHATATDNANFVAASIVVAKDDSDDSVSMFFESDDSGSSIVWMEGSSEEDLDYFAALDVAAAETPPRVMGAEDHPGVSAWHRRRRAVAKRRVGELSRGERRHRGEMEGGCLRMDGTGKRELLSSPAGASVGEGELRSLFAGEELRIMLFNYREMGIIPKVEPM

SEQ ID NO: 82257 - protein, 152 aa, Zea mays
  Coding DNA Sequence Number=SeqID_40478
MYGEMPADFGTLCSGEAQGDVRLGQCVGDAEVDGGSDSALETVLATAGGLPRVRRRGGSNAARSLRWRRTRGQRHLLCDSGSLTGEEEQGDIVSLYAVEKTLQQIVEKQYNLSDVFSELIDEVLRAESGDNEDVYDVQKTTTKSDDILPQSA

SEQ ID NO: 82258 - protein, 610 aa, Zea mays
  Coding DNA Sequence Number=SeqID_40479
  Gene Ontology: Mol. function=cysteine-type peptidase activity; Biological process=proteolysis
  Homolog annotation: Hit_ID=Q53MK8; Match level="QueryCoverage=73%, HitCoverage=47%, E-value=1e-24, Identity=23%"; Hit description=Ulp1 protease family, C-terminal catalytic domain, putative
MQAANEDDDFMPLSKKCNFDDSPPKVLKKIVTKRRKVVDPPDRLNVRCNPQDVLVSIQILNDRQRQAIARRGFSSIHDMRVDALGSRSHLAWLMEKLNHNDMTIRAGPGKELKITKETVHLILGLPNAGGGTTLGIDEAVAANNLRVELGLSKEDFRVAALQDRLRKGSNNDLSIRFLFLILFNRLLFPTASWGITNHEVLLTEEMDRFHEMDWCQLIFNDLCQAAKKWHTRSVTNVSTTIYGCSIVILLYYLDHLHDSAAPQNKRGTPRIKYFDRNIIQALTRADKGKIRQGQEPFGHCSHKTRTNTFDVPRPDPSGQHTIHIELPLIRDLISSKLNQLPSRHPLGFIEKLSHYDIEVGKACSVIKQTLQQIVEKQYNLSDVFGELIDEVLRAESGDNEDGYDVQKTTTKSDDILPQTAESCPDEADIDPLGKHDDSGKNMPTNTNVTPKATPHTESSSPIFDATPQIKVSVETDPATNTPQVDQVSLDSEMQTVLALREYLCGTQSDTSSHYSTLRNRNDTVGTLNLLINLYCTHFLSGTIIRGTLKAPNSQLPQKMTNSASPDPRARTQPWPQPTVSASPNPGARTRPRPRKTDSTSTSEEPPHRPT

SEQ ID NO: 82259 - protein, 84 aa, Zea mays
  Coding DNA Sequence Number=SeqID_40480
NEEESEVTEEKTPPPLESQAGTWLYFDICGSEPYSPTNEGKPCNKNTPTWRKRLQALSGGDPTEDDPTIVYMAGYLHTLDNHYD

SEQ ID NO: 82260 - protein, 59 aa, Zea mays
  Coding DNA Sequence Number=SeqID_40481
MDSSIYCTYLYPQTLTKNEEESEVTQEKTPPPLGSQAETRLYFDICGSEPDSPINEGKP

SEQ ID NO: 82261 - protein, 69 aa, Zea mays
  Coding DNA Sequence Number=SeqID_40482
MDSSIYCTYLYPQTLTKNEEESEVTQEKTPPPLESQAETWLYFDICGSEPDSPTNKGKPQCMQPLSLCF

SEQ ID NO: 82262 - protein, 175 aa, Zea mays
  Coding DNA Sequence Number=SeqID_40483
MDSSIYCTYLYPQTLTKNEEESEVTQEKTPPPLESQAGTWLYFDICGSEPDSPTNEGKPRLCNCFRISISPMFCIVCKTGETFLVRDDLWVADAAIRYLQDQLAKRDLALDWAINSRPFAWAKEAKARARVEELSLAMDNLQGQDIDVILGMNWLAQRKAILNPDLRTIGLSYDQ

SEQ ID NO: 82263 - protein, 132 aa, Zea mays
  Coding DNA Sequence Number=SeqID_40484
MPAAESQTRRWAWYLMEEVWPWEQRGKKPWQTDDGLRPVGMMIRLKEKGATLTWGPGLSSDPGSEIAAPTAIVVAVAAVVAAGGAPGGDHPQMMVGGGGGATRGLTRLCAPWAWELASSGLACGPLALLGRL

SEQ ID NO: 82264 - protein, 204 aa, Zea mays
  Coding DNA Sequence Number=SeqID_40485
MRLHILRGMKAEVILAFADICTHEGFFPLCSQDHTSSTGCQAHRRVWLSAAGICWEWCRCSTPSCCRDNASSFPCSSWGSGDSSASVGRCCNGAGVEWRRNGGGGPCWGICAPSEHWGDAGGTSNSNPPPAPEEMEMVFGRRLRSGAEQEAAPVPLPRMLSRAHQVLSDTGAAILREWEALQAEHQRLSDWCIQLEERTKSVSR

SEQ ID NO: 82265 - protein, 139 aa, Zea mays
  Coding DNA Sequence Number=SeqID_40486
MPGVLRLRAPPLLLLGGEVTGARVAVGYRGSEVAKVGQDRRGEPDEHTSGVLATRPRLEMGERLRESSERVGGNSREESRPRGEAIECDRARANSCGVGECYGPTPGHRSGLSWSNTARGAARDRTAARPNWLRSGMNK

SEQ ID NO: 82266 - protein, 227 aa, Zea mays
  Coding DNA Sequence Number=SeqID_40487
MPGVLRLRAPPLLLLGGEVTGARVAVGYRGSEVAKVGQDRRGEPDEHTSGVLATRPRLEMGERLRESSERVGGNSREESRPRGEAIECDRARANSCGVGECYGPTPGHRSGLSWSNTARGAARDRTAARPNWLSPASAPRTTLASFCSASPSLALCPRRKTPPETHARVPGPSSSWETAPSLTELRPEVRHPSPCPISLIAPCVWPISPSPVLARWPADLARSSSLE

SEQ ID NO: 82267 - protein, 55 aa, Zea mays
  Coding DNA Sequence Number=SeqID_40488
MALIPGFKGKLPNIFLGKGRIEFFQSTDYSDSGAKHNYYCSAPELRTMLNATYEH

SEQ ID NO: 82268 - protein, 261 aa, Zea mays
  Coding DNA Sequence Number=SeqID_40489
MDEGRTPESWGFELLEVPHNKGLTGPSSAVAAWADCREMTDTGLIMGEPSSHLLFTIFFSLLTAPFFLFALPTGRILSKSITITQRRKPKMLNHIQQSSTQELPSIVILGAREWKNGVACDLAEGILSGVFCFERDGSQGSWWGGYQVCALLGTGTEGVGAEFYRCDGGERGPGVAGDDGGGGCAAKGAWVAVVRCKGGMGGGSALQRERGRWLEMGHACGEHGGRIEFFQSTDYSDSGAKHNYYCLAPELRTMLNATYEH

SEQ ID NO: 82269 - protein, 76 aa, Zea mays
  Coding DNA Sequence Number=SeqID_40490
MGGGREFGRDTRRSEVKKKHWPREFVANGVAVTPEPYWNTTPLKKNEGRTLESWGFELLEVPHNKGVTGPSSAVAA

SEQ ID NO: 82270 - protein, 176 aa, Zea mays
  Coding DNA Sequence Number=SeqID_40491
MRKVMKKIFVGTRKMILKSEFEKIPRFEFLGCYKSTPLKRNLVLKIRLRRVMGIALPQLHIFTLQLFEEMELQQDLALRSIWLPIANADSGYSKTIFRLLGFAWQLAYWRSIGANTQTFLLRNPTWIPSLIGLLELYWNTTPLKKNEGRTLESWGFELLEVPHNKGVTGPSSAVAA

SEQ ID NO: 82271 - protein, 115 aa, Zea mays
  Coding DNA Sequence Number=SeqID_40492
MPPPTRNPFSAEGVEAGVSSLYSSYASLDTDPHSGYCTSTRVFHSMHAPSFSPSSDVPFTFPAFALFFLPNLLPLPTVTTASRSTLVDAGTGESVLLLAFLRACRRGGHDGACHA

SEQ ID NO: 82272 - protein, 148 aa, Zea mays
  Coding DNA Sequence Number=SeqID_40493
MPPPTRNPFSAEGVEAGVSSLYSSYASLDTDPHSGYCTSTRVFHSMHAPSFSPSSDVPFTFPGLRPFLPPQPVAPAHGHNREPINARRRGYGRVGLAPGFSSCVPPRRTRWRLPRLGYLGNNESRSEILDNQAVYYLYRLQSFSDNEQ

SEQ ID NO: 82273 - protein, 123 aa, Zea mays
  Coding DNA Sequence Number=SeqID_40494
MSKPDKTFPLLILPVLPSLLNPGVGPHEFGLSDCPHSLEWLYEKRSTGTDGLAFVEAFLAQKIYFRKFGLRLNLARGGWEGAVRGEVAELRGGDRRQWPLGEGLGRKSGVLSSRQCEETSELP

SEQ ID NO: 82274 - protein, 87 aa, Zea mays
  Coding DNA Sequence Number=SeqID_40495
MSKPDKTFPLLILPVLPSLLNPGVGPQEFGLSDCPHSLEWLYEKRSTGTDGLAFVEAFLAQKIYFRKCGLRSFSRGYGIRIRGLRFF

SEQ ID NO: 82275 - protein, 258 aa, Zea mays
  Coding DNA Sequence Number=SeqID_40496
MQELGHGKQRRLKARLLRDILEPDTLSKSAQSSPGGHFRNPSMPRGYPTVISKKADVPPHHSVIFLKVTCEAGYHSALPLKRRPRAQSLGVASKMPKSTFNHSALPLKRRPRAQSLGINSKMPTPTLNHLALPLKRRPRVQSLGVASKMPKPTFNHSACPLTRRPRVQSLGVASKVPKPTFNHSACPLTRRPRVQSLDITSKMPTPTFNRSALFLKRRPHILSLSITSKMPMSTFYHSALPLKNADLVFDCLVLLLKR

SEQ ID NO: 82276 - protein, 74 aa, Zea mays
  Coding DNA Sequence Number=SeqID_40497
MGKNNKRKREPTPPSEEFGDSEYSEEEFSSEFEGSPAPIPLLETTPSDVKVDISVLEVTPSNRTQDQRFRGNAE

SEQ ID NO: 82277 - protein, 209 aa, Zea mays
  Coding DNA Sequence Number=SeqID_40498
  Subcellular localization annotation: CTP_CleavageSite=59; ConfidenceScore=5.42e-01
MADGSSTWGRRDPSWASDAAAGRSRGGRPRQRKEGTTLVSVLGRSTRPNCILEWRMTTSAGEMSELAAALQVEYELQVSQNQLVELLLTLSRFSQYHREYDGRLLIQPQAYFYAHRRDYKSRIKLVTNMMQQSGCMLVLYVLTNFANNMAIAFYLGGIVMTLTLRYQPVAEPPSYWAHMHPSLSQRPQTAMHVHQITQQDLSDCPKDIE

SEQ ID NO: 82278 - protein, 225 aa, Zea mays
  Coding DNA Sequence Number=SeqID_40499
MNAARDKNGAKKIHRGGGISFHERRQDFSTERERRWITNVCTDEDWSARLEEISTGEERSRERIATGGGEKSSRQDRIGCVLEDKLGHNLARTILLRRRAILINLSGIKCPPPLKESRPEIQSKRLSRVEKQFAFFLMTLYYLSLLSERQIRDLTQTESDTTSWVNTQNKVYQQAVTLQVSQNQLVELLLTLGKSSQYHRNLFGHVVHPFLHARRIIHLVREYMD

SEQ ID NO: 82279 - protein, 171 aa, Zea mays
  Coding DNA Sequence Number=SeqID_40500
  Homolog annotation: Hit_ID=Q6QP51; Match level="QueryCoverage=70%, HitCoverage=52%, E-value=1e-13, Identity=45%"; Hit description =Putative growth-regulating factor 1
MGWREMEHKGKTRLVLSRTRGVLVVGVTSVREREGVSLFVSSSFPRVTLSQEGPGPLFYRCKERVQVYNGGCSLCANVSGREVPEPCVHANVAVGEGAENHRRHGRTRGAIITCYRDEPDGTPVLFPRILSYLGPCPGDWHNSRSGMSDAVFLSDRSVKGRSDCGYFDLAD

SEQ ID NO: 82280 - protein, 179 aa, Zea mays
  Coding DNA Sequence Number=SeqID_40501
MADKGKGRGIVIGNPRMSIISQKEIARKALDEKAKKLGGTSCRRFGPWGTLNRADQCKERVQVYNGGVAYALTCLAKKCLSPVYMPTWLSEKGLSPAYAITWPSKKSLSPVEAQLAGNDVSPMAQSVRAQGRARRRLLLRPRLRLSLGVGRGGDLLPRPRPKVESWGRARRRLPPEAEA

SEQ ID NO: 82281 - protein, 69 aa, Zea mays
  Coding DNA Sequence Number=SeqID_40502
MRVEWDALSCLIRGTRGVVGFVVGPSMGSGHSTCSAEAGCRGCPHCTQCSGGDVGNMEDFEEFQDYDEF

SEQ ID NO: 82282 - protein, 45 aa, Zea mays
  Coding DNA Sequence Number=SeqID_40503
MAKPTTPVVPLINQLRASHSTLMVALLSRVVTPQTGPYGEVKAIA

SEQ ID NO: 82283 - protein, 45 aa, Zea mays
  Coding DNA Sequence Number=SeqID_40504
MAKPTTPLVPLINQLRASHSTLMVALLSRVVTPQTGPYGEVKAIA

SEQ ID NO: 82284 - protein, 190 aa, Zea mays
  Coding DNA Sequence Number=SeqID_40505
  Subcellular localization annotation: CTP_CleavageSite=28; ConfidenceScore=5.36e-01
MKPTTPLVPLINQLRASHSTLMVALLSRVSLPKQGSARYNTGQRVDSRKPEGLFNKNTREGVLGDLNHQIADQRPRSDHADGLGAQARIGTRRSGPHNQDQMVEINAGKVLRLQAAPLLLLGGEVAGDERNRHGRALGVQGKAQARSGHLANSVPGAIPAGRHQRAWNTMRRPYGGADQLWQRIARTLGQ

SEQ ID NO: 82285 - protein, 135 aa, Zea mays
  Coding DNA Sequence Number=SeqID_40506
MPPVLWTYETATCLTGVDFPDYQFISIDKKAFPPNQPLGRLSINGRTRQSGVPPDTVRCLLEWIVVLEPLLYWHTGQSGGPPDSLVNYSGAALQKPEGEEFESIAPCAPDTVRWHTKQSGAPDQGSLWFLLFLSF

SEQ ID NO: 82286 - protein, 127 aa, Zea mays
  Coding DNA Sequence Number=SeqID_40507
MESSARTRLPLHSIGIIYPSPSLRTILHFGIIFTHIYLYHWGESAKGSAQTNKKIKVRVQKKGAKETKENPGLAHRTVRCATKQCPEVSNNPPWAIQEKGDLVEEENANFKDKESGTKDEVEDDDNA

SEQ ID NO: 82287 - protein, 308 aa, Zea mays
  Coding DNA Sequence Number=SeqID_40508
  Homolog annotation: Hit_ID=Q8SA97; Match level="QueryCoverage=36%, HitCoverage=21%, E-value=3e-17, Identity=59%"; Hit description =Ornithine carbamoyltransferase
MAPPVDVAGLRPRLGDVEAPPKLRSSLSSVAEVESEPPGRARRRSPADAGAESEPWGRAKRSSSSSGAEPKSEPWVGRGGDRRLPGLSPSPSPGSGGVRRLPRLSPSPSPGSGGVRRLPGLSSSPSPGSGGVRRLPGLSPSPSPGSGEAELPMVPSTGPDCLSASLCRVAPQSEWRRRRCLSVRPEDQGRKRKHPLTPPSEDFGDSEFLEERFSSEGEEPPSSVPLSPSLEGSDNSIRLSVMKRAYVRSIERVGFEGSDSSEEDSEEGGGGDDGSDYDGGDEGGNDVNGGVGATMKTSATTVTMRATR

SEQ ID NO: 82288 - protein, 505 aa, Zea mays
  Coding DNA Sequence Number=SeqID_40509
  Homolog annotation: Hit_ID=Q8SA97; Match level="QueryCoverage=22%, HitCoverage=21%, E-value=3e-17, Identity=59%"; Hit description =Ornithine carbamoyltransferase
MAPPVDVAGLRPRLGDVEAPPKLRSSLSSVAEVESEPPGRARRRSPADAGAESEPWGRAKRSSSSSGAEPKSEPWVGRGGDRRLPGLSPSPSPGSGGVRRLPRLSPSPSPGSGGVRRLPGLSSSPSPGSGGVRRLPGLSPSPSPGSGEAELPMVPSTGPDCLSASLCRVAPQSEWRRRRCLSVRPEDQGRKRKHPLTPPSEDFGDSEFLEERFSSEGEEPPSSVPLSPSLEGSDNSIRLSVMKRAYVRSIERVGFEGSDSSEEDSEEGGGGDDGSDYDGGDEGGNDVNGGVGATMKTSATTVTMRATRNYARSRLIYVGAPTQTVAHVRANTTGIRLIPVGQGRSRAGSFLLFPSLPDRRPAQPPPTAARSCPCPSAAGEAAPARAAPPEPAPPERRPHPRLPRPSRPGSTPPPCPTGAVAEHRRRLSAAAQPEVALPPRPPCPRPPRPSAAAAPPERRRRRRPAPERRRRRPSATTSSRAPRTPSVVVPSPSSSTVRSCPDGNQ

SEQ ID NO: 82289 - protein, 101 aa, Zea mays
  Coding DNA Sequence Number=SeqID_40510
MATYPGGKTGPWRRSSLDPPRLTSLVHNFPDYAGQRNEEKNANTSMGNSPRLGLCINRATLGADLAAQSKASTRGVSERARKPASGRKSATARWDCGVGAA

SEQ ID NO: 82290 - protein, 132 aa, Zea mays
  Coding DNA Sequence Number=SeqID_40511
MATYPGGKTGPWRRSSLDPPRLTSLVHNFPDYAGQRNEEKNANTSMGNSPRLGLCINRATLGADLAAQSKASTRGVSERARKPASGRKSATARWDCGVGAARDVAPQHLMCPVHSTGRRCAASTFNVSCPLH

SEQ ID NO: 82291 - protein, 56 aa, Zea mays
  Coding DNA Sequence Number=SeqID_40512
MAFVAAAFAKKPETPTTADVAQEKHEELERCIDECESGSELLTAANITDTNVDERL

SEQ ID NO: 82292 - protein, 120 aa, Zea mays
  Coding DNA Sequence Number=SeqID_40513
MVALHRELARLAARSVARLPAGAGLGGSGTAEEAEMVAALMDVAAASAAAVFSAVASVSAAASSCSNKKAPTAFVAAAFAKKPETPTTADVAQEKHEELERCIDECESGSEVVFRSIVLE

SEQ ID NO: 82293 - protein, 57 aa, Zea mays
  Coding DNA Sequence Number=SeqID_40514
  Homolog annotation: Hit_ID=Q75GM0; Match level="QueryCoverage=87%, HitCoverage=8%, E-value=5e-12, Identity=66%"; Hit description =Putative phytosulfokine receptor kinase
MELFGKVCQHQNIVPLRAYYYSKDEKLLVYVPLGSLCAALHGNKAVGKNPIGLGDPG

SEQ ID NO: 82294 - protein, 46 aa, Zea mays
  Coding DNA Sequence Number=SeqID_40515
  Homolog annotation: Hit_ID=Q75GM0; Match level="QueryCoverage=91%, HitCoverage=7%, E-value=8e-10, Identity=73%"; Hit description =Putative phytosulfokine receptor kinase
MELIGKVCQHQNTVPLRAYYYSKDEKLFVYVPLGSLCAALHVNAKE

SEQ ID NO: 82295 - protein, 102 aa, Zea mays
  Coding DNA Sequence Number=SeqID_40516
MNVCELTLAVSHPPTGQEQVGHEEVVPGCPAWLSSGAVHSGGHRGMRCGFRIPGPPSFSAASEATTVTAPKWMPAPACVLLNLDTSAFSLLDLALASSGVIR

SEQ ID NO: 82296 - protein, 141 aa, Zea mays
  Coding DNA Sequence Number=SeqID_40517
  Homolog annotation: Hit_ID=Q8L3P5; Match level="QueryCoverage=23%, HitCoverage=3%, E-value=3e-08, Identity=78%"; Hit description=Beta -galactosidase
MGLRGSNQNRGGVQEEEVVLEGKISQVCEDHTVSRTRKPSARCGFPLRPPSWSGEVGHEEVVPGCPAGLRSGAVRSGGRRGMRQCAVAYDKKAMLIDGQMWILFSGSIHYPRSTPDVTAFYKISSPPTIPWRGLWLRSAVS

SEQ ID NO: 82297 - protein, 148 aa, Zea mays
  Coding DNA Sequence Number=SeqID_40518
  Gene Ontology: Mol. function=transferase activity, transferring glycosyl groups; Biological process=metabolic process
  Homolog annotation: Hit_ID=Q6Z381; Match level="QueryCoverage=51%, HitCoverage=14%, E-value=3e-19, Identity=71%"; Hit description =Putative UDP-glucosyltransferase
MADAGIDPQVVLKREDGGRGGLVVCGGIRAGARAAGGGRVSERAARVHSDTVTFVSTPRNVARLSAISPELSVCLRVVVLDLPPQVEGLLVGAESTVDLPPEKVELLKEAFDDLVAPFASFVVESPAGVCRARRTSGVVASASVASPT

SEQ ID NO: 82298 - protein, 172 aa, Zea mays
  Coding DNA Sequence Number=SeqID_40519
MHCALPSSEPPDGERLRCFRLAVVGGAQLRGSWYLSAIARLQGFSSGSPTASPCRWSPKTVTTSLMVGRSKPGCDLCPALSFKDLHHPCRGRGRAEPELYLPYGSVGHLLLHHLGERALAGLAEGADFDNAVPIGRKRRQLQHAWFAGSAGSGAASGATSHRRAECGYLPAV

SEQ ID NO: 82299 - protein, 303 aa, Zea mays
  Coding DNA Sequence Number=SeqID_40520
  Subcellular localization annotation: CTP_CleavageSite=36; ConfidenceScore=5.01e-01
MPGLLAQLALAQLPVPPSTAGAECGYLPAVRAAVVSCAPGDHPRRRTPLGRRLCSWVVLPSLRHDASARRSVLARPRGLEWGSTGGQVATVVGAEVVAAGEGFSTDETISATRGSTSGSLALIACPRPSSGDAGEGLVAAASALRSSLLLFSRPERRSLSLLMERPAASQPKFVVPQALRCGGCSYPREWNRSSVCNGTLSAGVCSLWLSGPKHLAAEAQTYHCRTIKLRFLSSCFEYQDLFVGNRIVYPSESYFSRKVMSEDSVIDIVEKARKIIPPERFLSVKTCSAAESLIRARVTYRGR

SEQ ID NO: 82300 - protein, 119 aa, Zea mays
  Coding DNA Sequence Number=SeqID_40521
MRTIRLKSPKNSQEKPPEQQSVGGGKCPLTYPCPIHSLIHLPHYTFMPKVAMRLMVLVMTVVLVVSIATTAQEKMKPWKETSRSSKTTTSSRCGLAATPSRLPVKAAFIYVSFPHFDLL

SEQ ID NO: 82301 - protein, 95 aa, Zea mays
  Coding DNA Sequence Number=SeqID_40522
  Subcellular localization annotation: CTP_CleavageSite=63; ConfidenceScore=5.08e-01
MESHDLQVAMRLMVLVMTMVLGVSIATTAQEKMKPWKETSRSSKTTTSSRRGLAATPSRLPVKAAFIYVSFPHFDFVKTMWMSQTYDVIDYYFPF

SEQ ID NO: 82302 - protein, 179 aa, Zea mays
  Coding DNA Sequence Number=SeqID_40523
  Subcellular localization annotation: CTP_CleavageSite=65; ConfidenceScore=5.63e-01
MGQATHPSGSWSAEKSVSWLELLSPPPSSRSPPAATPGAGASSGGAGGASRGARGSSSSQTLSPVGARKRSPAAPVVDAPAPHAGGDAASPNGWTDWPQDGEANAPRDERVSGPTVNTTLIPPMSHPVLEGKPNANHVRARISNSRTQQLHNMDIITQCSNSIKKGNNSRLHHMSETST

SEQ ID NO: 82303 - protein, 182 aa, Zea mays
  Coding DNA Sequence Number=SeqID_40524
MAGLSKRTPPRASQACRGMKTVYELDGDSPERAGHGRASFHGAADGIGGNLELELVGEPLGAILDVEFTSERSQLERDHKEYKRDLQRVCARELEATRREKKVARREEAVTQREALTMEYQAKLSALDQTLEAQRAQLVKAIERLQKWQQELKGKASDAALAEENLKEKELSLDRRETDLAR

SEQ ID NO: 82304 - protein, 248 aa, Zea mays
  Coding DNA Sequence Number=SeqID_40525
FLREWEALEAEHQHLSDWRTQLEERTKTKWQQELEGKASDVALAEENLKEKELSLDRRETDLAREEMLVRRSELLAEHELEAEEKERKLEEQIHQFDAVQAAPGPQAMEATRKALEDLQAEHRAEVQRITEWVGEASTTLVPLGMSPIPVSEPPVSISDALPVLDSTADRLRRLDQILGARLEAEGSKLCRAVVDYVLTCFRSHDPAISLASVIDGPVAATEDVVRESVQDVVEMVAARFQRDPVDAE

SEQ ID NO: 82305 - protein, 90 aa, Zea mays
  Coding DNA Sequence Number=SeqID_40526
  Subcellular localization annotation: CTP_CleavageSite=24; ConfidenceScore=5.59e-01
MAPAPAAAQTQPAAGVLPQEAPVLGKARSKRSRVAPCSWASHVLVLPPPPGSPASAAISPFESGTAAPLGDGAEDGSVAKGDLFARREIN

SEQ ID NO: 82306 - protein, 88 aa, Zea mays
  Coding DNA Sequence Number=SeqID_40527
  Subcellular localization annotation: CTP_CleavageSite=54; ConfidenceScore=5.67e-01
MAPAPAAAQTQPAAGVLPQEAPVLGKARSKRSRVAPCSWASHVLVLPPPPGSPASAAISPFESGTAAPWVTALKTAVWPRRLIRTAGD

SEQ ID NO: 82307 - protein, 325 aa, Zea mays
  Coding DNA Sequence Number=SeqID_40528
MPRNQVIGSESLLNPPAAEFSPAGRPMEDSLVIRTSYCSKVEGFPHLLRSCALHMGIRKKPEYVRKEYLENGMEKCSMAVYLGESRSYPNHPSFQVTFTRHRFPDTCQNVARKALRRLCQNYSRKVVETPLRYFPPNNKNTPAWRKRLQALSGRDPTEDDPTIVYMAGYLHTLDNQYDDLSSHCTYLNSQVESLEQQVKKLKREKASLQESLEIAEGEETNTREAYQTLKMDYDKKLKKLAPAKKIRKKTRNQGCQMEQKEEAPPALPPTRIENSSDTEAMSLASLDDLLKEFGDTLEKEFGSTLDSTRVYRWLRIKPRLPPPGL

SEQ ID NO: 82308 - protein, 299 aa, Zea mays
  Coding DNA Sequence Number=SeqID_40529
MEDSLVIRTSYCSKVEGFPHLLRSCALHMGIRKKPEYVRKEYLENGMEKCSMAVYLGESRSYPNHPSFQVTFTRHRFPDTCQNVARKALRRLCQNYSRKVVETPLRYFPPNNKNTPAWRKRLQALSGRDPTEDDPTIVYMAGYLHTLDNQYDDLSSHCTYLNSQVESLEQQVKKLKREKASLQESLEIAEGEETNTREAYQTLKMDYDKKLKKLAPAKKIRKKTRNQGCQMEQKEEAPPALPPTRIENSSDTEAMSLASLDDLLKEFGDTLEKEFGSTLDSTRVYRWLRIKPRLPPPGL

SEQ ID NO: 82309 - protein, 157 aa, Zea mays
  Coding DNA Sequence Number=SeqID_40530
MKKKSKRDLEMKHKTAALKLTQRFLSKDLKWERQEMCEREGGVSWAWQPVCQSDWQTDAQTDRRRVKVEQHQLNRPGGAVEPPLTAPGDLFASLTGRLQIRGQRGQRPAELPLRTSSTGLDYSAQLQLKKLNSAEVKFSWKAQLQLKKFSCFSARTL

SEQ ID NO: 82310 - protein, 148 aa, Zea mays
  Coding DNA Sequence Number=SeqID_40531
MERQEMCEREGGFLGLEIEFISHSHLCGPVEPAPWQAWQPVCQSDWQTDAQTDRRRVKVEQHQLNRPGGAVEPPLTAPGDLFASLTGRLQIRGQRGQRPAELPLRTSSTGLDYSAQLQLKKLNSAEVKFSWKAQLQLKKFSCFSARTL

SEQ ID NO: 82311 - protein, 143 aa, Zea mays
  Coding DNA Sequence Number=SeqID_40532
MKHKNRSSQAHSKISLQRFEMGEARDVCEREGGVSWVGNGVQNRALGYGERGRLSLPLGRLSLPWQAWQPVCQSDWQTDAQTDRRLVKVDQNQLNRPGGAVEPPLTAPGDLFASLTGRLQNRGQRGQRPAELPLRTSSTGLDQ

SEQ ID NO: 82312 - protein, 150 aa, Zea mays
  Coding DNA Sequence Number=SeqID_40533
  Subcellular localization annotation: CTP_CleavageSite=37; ConfidenceScore=5.00e-01
MVRERRTQTNTMSKNTRDTRFIPRFGHTTKVPYFLVEAPTKSRVSFNPNPPFADHKGRLNLPLGRLSLPWQAWQPVCQSDWQTDAQTDRRLVKVDQNQLNRPGGAVEPPLTAPGDLFASLTGRLQIRGQRGQRPAELPLRTSSTGLDQRV

SEQ ID NO: 82313 - protein, 139 aa, Zea mays
  Coding DNA Sequence Number=SeqID_40534
  Subcellular localization annotation: CTP_CleavageSite=26; ConfidenceScore=5.12e-01
MSKNTRDTRFIPRFGHTTKVPYFLVEAPTKSRVSFNPNPPFADHKGRLNLPLGRLSLPWQAWQPVCQSDWQTDAQTDRRLVKVDQNQLNRPGGAVEPPLTAPGDLFASLTGRLQIRGQRGQRPAELPLRTSSTGLDQRV

SEQ ID NO: 82314 - protein, 139 aa, Zea mays
  Coding DNA Sequence Number=SeqID_40535
  Subcellular localization annotation: CTP_CleavageSite=26; ConfidenceScore=5.09e-01
MNKNTRDTRFIPRFGHTTKVPYFLVEAPTKSRVSFNPNPPFADHKGRLNLPLGRLSLPWQAWQPVCQSDWQTDAQTDRRLVKVDQNQLNRPGGAVEPPLTAPGDLFASLTGRLQIRGQRGQRPAELPLRTSSTGLDQRV

SEQ ID NO: 82315 - protein, 150 aa, Zea mays
  Coding DNA Sequence Number=SeqID_40536
  Subcellular localization annotation: CTP_CleavageSite=26; ConfidenceScore=5.09e-01
MNKNTRDTRFIPRFGHTTKVPYFLVEAPTKSRVSFNPNPPFADHKGRLNLPLGRLSLPWQAWQPVCQSDWQTDAQTDRRLVKVDQNQLNRPGGAVEPPLTAPGDLFASLSVRLPVRLAKGAERPARGGSTALGGAQLQLKELSSAEVQLS

SEQ ID NO: 82316 - protein, 58 aa, Zea mays
  Coding DNA Sequence Number=SeqID_40537
MGASSSHRGRGLPCRFRRGREHAGLPRVTAPVPQSRRRGIGASGSAVSLHAVTVAPVA

SEQ ID NO: 82317 - protein, 430 aa, Zea mays
  Coding DNA Sequence Number=SeqID_40538
  Homolog annotation: Hit_ID=Q6QP51; Match level="QueryCoverage=50%, HitCoverage=90%, E-value=9e-22, Identity=37%"; Hit description =Putative growth-regulating factor 1
MQVVCNRTAMAHPFGFVASGMEAQAHMSCNRRAGYYVQETTPPLAPMPRLLDCGTGAATRGSPARDPTVPIECNDHGLASPPEAAGEPSPTARRRHARVPFLERLAHAAVPRIARPVALTPRQGKRHLWQAKRATFYLHHDDHVKKGTGKGDISKGILLREGSGPPSPPTDQGFEGWPLGRVRQLPQSTRASHPLLIRGSKAGPWKGSTAAPEHAERGMTLGTSVTWPRLELRSRGTLGHFRDQQEQFCNGIPSEGGIEPSDPIEWVRVRQITCSHFTLSLTDLTGKQRRSPRSDCCATHQGEVGNSQVQPRAQQEAPPRSTLGLGLGRRSPPRPTLGLGLNLGLGRRSPPRPTLGLSLNPGLGRNRVLARPQPRPQEKLRGNKTGVPSGTPRAQALLRRPRYRVHRAIAPLQQPCWHVHRAQAPLCQTH

SEQ ID NO: 82318 - protein, 117 aa, Zea mays
  Coding DNA Sequence Number=SeqID_40539
MTLYGRGLTEHCRRSVAAQVPTSGPAQATPADVDTSILAAANATPFNGNVSEGSETESWSSDGDDFGSPLLWIGESSEEDLDYFVALDLAASESPPQFDAREESAPPAMAIAEDHHR

SEQ ID NO: 82319 - protein, 416 aa, Zea mays
  Coding DNA Sequence Number=SeqID_40540
MEKDRQDGPRKCQAYARLADPRREAKVAWPSAKPAASGASMPPPAMPTSERRPPSPPHATETAVSGTEVSMELSVDDYLVGGVAMFDAHTRLAPAAAAFAKHIASRALSLEFSTERRRLEGRIERLRTQHTEAVRDKSAAENKCRNLLEKLTEREGTEKARAEAQAAHTEADATRAEANLALKCAADAESGLKSLCSYTEKTEASTRAGVERAHTLFVDVYHELGARTTPFDMSGEEVGIRFLGWLKEELESLPSIATGLMSYASLVTCEGAANALSREGCRHFEVFDRVTVDFDRGIFQVGDEVLKRSARALYDRMWGPHGRDTVRERDDRALAQMMNDKEVEDFGGLESSLTRTDGVETGLKVPTSGPAQATPTDVDTSILAAANATPFNVNVSEGSETESWSSDGDDFGSPLS

SEQ ID NO: 82320 - protein, 56 aa, Zea mays
  Coding DNA Sequence Number=SeqID_40541
MAFSPFLPDSGDPGATLARASLNSGDLTAVEKSSTAYNEQSEVPDCVVGDLPEQQP

SEQ ID NO: 82321 - protein, 289 aa, Zea mays
  Coding DNA Sequence Number=SeqID_40542
  Subcellular localization annotation: CTP_CleavageSite=51; ConfidenceScore=5.37e-01
MDQRVRTRARHRVSRPRRRPSRLAPLFRAPPVPRTHSPHFTHPRPLSHFALAARRRRRPALTFPTVQLAGDRAKPPQAPPQGETPVPVPNFPYCALCSSNFAFAGARPRQSTALARWLADLARSSSPVLVPKVHLPLLKPAKALARLKSPPRGRSRSPKLLRPTRDLLTAALSSLPVDSWPFPAIEFAVAPSSPLPNSGDPGATLARARLNSGDLTVTERNDTSDSDRDDDKKGKKRMEKKKYYKKGGKAHMGWEWDSDESSIDSSPTRTLPTSPSTRDFSSQTSATNA

SEQ ID NO: 82322 - protein, 136 aa, Zea mays
  Coding DNA Sequence Number=SeqID_40543
  Subcellular localization annotation: CTP_CleavageSite=79; ConfidenceScore=5.48e-01
MPTPTFNHSALPLKRRPHVQSLGIASKMPTPTFNHSALPLKRRPHVQSLGITSKMPTPTFNHSALSLKRRPCVQSLGIASKMPTPTLNHSALSLNTDHVFNRLALLLKCRRRHSITRRCLYNADHVFTRPALLLKC

SEQ ID NO: 82323 - protein, 175 aa, Zea mays
  Coding DNA Sequence Number=SeqID_40544
MCHLITRPFSSKKLEEAGYHSALPLKRRPWVQSLGVTSKMPTPTFNHSALPLKRRPHVQSLGIASKMPTPTFNHSALPLKRRPHVQSLGITSKMPTPTFNHSALSLKRRPCVQSLGIASKMPTPTLNHSALSLNTDHVFNRLALLLKCRRRHSITRRCLYNADHVFTRPALLLKC

SEQ ID NO: 82324 - protein, 372 aa, Zea mays
  Coding DNA Sequence Number=SeqID_40545
  Homolog annotation: Hit_ID=Q5XTZ4; Match level="QueryCoverage=28%, HitCoverage=23%, E-value=2e-26, Identity=61%"; Hit description=Salt -inducible protein kinase
MTPLCSLRPLCGNLLVNLRDPRRPICKVGYFGLSRIKRNTLVSGGVCGTLPWMAPKLLNGSNNKVSEKASFFPTILLIALCIWNPDRLIRNEYLVLHMQVDVFSFGIVLWEILTGEEPLRCFIYNFCSVLFLITHLFLNIAVYVIKEFSVRIQICMYVPMCQRSNNPDSLASSFVQMVELGYKSMAHFLIATHRASSDNSEDSSPAGKEKSLSTKSESSCISDHDGPDANERPEDGETSSKAKVKKATRRKGKKSSDGDKEDSRSESVVTSECQDGHQANTEAGCVTQSSKSVSRKRKGSVPFAMKLWRFHLQAVHGMLAKMFSFSRECILIEENKGLLSTSSFDRPRARSHVAVNFFIPNMMQNTIATHCY

SEQ ID NO: 82325 - protein, 231 aa, Zea mays
  Coding DNA Sequence Number=SeqID_40546
  Gene Ontology: Mol. function=polygalacturonase activity; Biological process=carbohydrate metabolic process
  Homolog annotation: Hit_ID=Q10SE9; Match level="QueryCoverage=54%, HitCoverage=45%, E-value=1e-34, Identity=79%"; Hit description =Polygalacturonase, putative, expressed
MAYGDRVITFEDSEKESEYGYVRKDMKHWPLIAPLPSYGRGRDEPGARYSNFIGGSNLTDVIITESSSRVKIEDCYIVSGDDCVAVKSGWDEYGIRFNMPSQHIVIQRLTSVSPTSAMIALSSEMSGGIRDVRAKDSVAINTESAIRVKTLGAIAGVLSRNELVAAALFTLAINHKQVDVFSFGIVLWEILTGEEPYANMHCGAIIALIEVITSQATSWSCYRTDQAPNHD

SEQ ID NO: 82326 - protein, 223 aa, Zea mays
  Coding DNA Sequence Number=SeqID_40547
  Gene Ontology: Mol. function=DNA binding
  Pfam annotation: Domain name=Bromodomain; Domain location=1-74; Score= 10.2; E_value=0.00024; Accession=PF00439.15; Description=Bromodomain
MGLSLKNCAKLKNRKRARYKKVIHRHMDFRMLHSKIKSGAISGTKELLRDILIFINNVITFYLKTTLEHMDVVELHDFARKNVKQSASLFLKSHRETKTAGAPVMKKNARSLHFSRTSLHSRDARAIKVSSRDAAAKEGDGKRPCSDELANQNTTKTNEPAKKRGVGRPPKSEQRIAGAQENSPIKGRKSSTGAQVDSPSKGRKRSAEAHDDSSSKGGKRSRR

SEQ ID NO: 82327 - protein, 341 aa, Zea mays
  Coding DNA Sequence Number=SeqID_40548
  Homolog annotation: Hit_ID=Q10A12; Match level="QueryCoverage=14%, HitCoverage=13%, E-value=2e-07, Identity=77%"; Hit description =Dimethyladenosine transferase, putative, expressed
  Pfam annotation: Domain name=Bromodomain; Domain location=105-192; Score=10.4; E_value=0.00023; Accession=PF00439.15; Description =Bromodomain
  Subcellular localization annotation: CTP_CleavageSite=18; ConfidenceScore=5.28e-01
MATNQQPVDGIAARSRRRCPIGGGPTNTGNRRMGSPHLPSPSLPRRVLWRRGWLKANQFGGCVRRAARGGGIPFEKSKRQHIMWNLALVNSIVAKARLNPTGTILEIGPSVETSPSASSMRCYMVGQFDVLRKRARYKKVIHRHMDFRMLHSKIKSGAISGTKELLRDILIFINNVITFYLKTTLEHMDVVELHDFARKNVKQSASLFLKSHRETKTAGAPVMKKNARSLHFSRTSLHSRDARAIKVSSRDAAAKEGDGKRPCSDELANQNTTKTNEPAKKRGVGRPPKSEQRIAGAQENSPIKGRKSSTGAQVDSPSKGRKRSAEAHDDSSSKGGKRSRR

SEQ ID NO: 82328 - protein, 210 aa, Zea mays
  Coding DNA Sequence Number=SeqID_40549
  Gene Ontology: Mol. function=glyceraldehyde-3-phosphate dehydrogenase (phosphorylating) activity; Biological process=glucose metabolic process
  Homolog annotation: Hit_ID=P12863; Match level="QueryCoverage=40%, HitCoverage=34%, E-value=2e-40, Identity=95%"; Hit description =Triosephosphate isomerase, cytosolic
  Pfam annotation: Domain name=TIM; Domain location=1-102; Score=-16.5; E_value=9.4e-10; Accession=PF00121.9; Description=Triosephosphate isomerase
MDQMVVCFTKKIKDWSNVVVAYEPVWAIGTGKVATVAQAQEVHASLRDWLKTNVSPEVAESTRIFYGGSVTAANCKELAAQPDVDGFLVGGASLKMGLLVLFKYFRFCGRKSGCCGALVNGTLNVDDAENEVEEVLTASLILESTADYKDPCSRFLDHCCPREITRTSYPRIVIVADRQNFPSFNTVLDCHSRREVIKQDAKIVRKELCD

SEQ ID NO: 82329 - protein, 239 aa, Zea mays
  Coding DNA Sequence Number=SeqID_40550
  Homolog annotation: Hit_ID=P12863; Match level="QueryCoverage=35%, HitCoverage=34%, E-value=3e-40, Identity=95%"; Hit description =Triosephosphate isomerase, cytosolic
  Pfam annotation: Domain name=TIM; Domain location=1-102; Score=-16.5; E_value=9.4e-10; Accession=PF00121.9; Description=Triosephosphate isomerase
MDQMVVCFTKKIKDWSNVVVAYEPVWAIGTGKVATVAQAQEVHASLRDWLKTNVSPEVAESTRIFYGGSVTAANCKELAAQPDVDGFLVGGASLKMGLLVLFKYFRFCGRKSGCCGALVNGTLNVDDAENEVEEVLTASLILESTADYKDPCSRFLDHCCPREITRTSYPRIVIVADRQNFPSFNTVLDCHSRREVIKQDAKIVRRNFVIDLLSYEDNSCRYAIPANIQQRLIDIAKKD

SEQ ID NO: 82330 - protein, 170 aa, Zea mays
  Coding DNA Sequence Number=SeqID_40551
  Subcellular localization annotation: CTP_CleavageSite=25; ConfidenceScore=5.20e-01
MAQSTVGSLRAVGTPDMSGAHRTVRCPLLAVGSATCPAQIARLTVGPTDRWLTGQSGAHRTVRITHELGLNAKDNLYPQDLSRTKHFCKSYFDTSPEVSIKCGESKEQHVPDDLWWYSSIKGIKELEENLRMLGQMIEELELTWNKLAAVRCSCGVFEPIWGKLEIGVPQ

SEQ ID NO: 82331 - protein, 59 aa, Zea mays
  Coding DNA Sequence Number=SeqID_40552
MNRSVPPESTPPLLGGPLPGGITPELGLNAKDNLYPQDLSRAKHFCKSDFDTSPEVSIK

SEQ ID NO: 82332 - protein, 132 aa, Zea mays
  Coding DNA Sequence Number=SeqID_40553
  Subcellular localization annotation: CTP_CleavageSite=91; ConfidenceScore=5.45e-01
MTNVLGGTAPPWCLIGGAVRHLWPALCSSPAPRSSAAPLPSRAYKRAAPSSSFPAPASAIPLLPRPSSIRGRAAAIVFLPGEAGTFDPEPVAPEEGPEPELPEVDLLCQESFDEGKSILPLMHKLPILSTTA

SEQ ID NO: 82333 - protein, 115 aa, Zea mays
  Coding DNA Sequence Number=SeqID_40554
  Subcellular localization annotation: CTP_CleavageSite=65; ConfidenceScore=5.40e-01
MTNVLGGTAPPWCLIGGAVRHLWPALCSSPAPRSSAAPLPSRAYKRAAPSSSFPAPASAIPLLPRPSSIRGRAAAIVFLPVHHFPTPITRPKLTDGNPAAKLRRLPTDNPLPDLL

SEQ ID NO: 82334 - protein, 340 aa, Zea mays
  Coding DNA Sequence Number=SeqID_40555
  Gene Ontology: Mol. function=helicase activity; Biological process =protein amino acid phosphorylation
  Homolog annotation: Hit_ID=Q8SBB7; Match level="QueryCoverage=99%, HitCoverage=28%, E-value=1e-86, Identity=47%"; Hit description =Putative helicase
  Pfam annotation: Domain name=DUF889; Domain location=2-217; Score =116.8; E_value=6.1e-32; Accession=PF05970.5; Description=Eukaryotic protein of unknown function (DUF889)
MRRSITCVSSKRCDALAEFSKWVLSIGDCTIPIEKMDDEAEPSWIMIPPDLLIHDDGDKILALITEVYPNFIANHRNYDYLAARAIICPNNSTVDDINERIVLMVPGSGVECISCDTISKSAEHIPDFDVLYPTEFLNSINAPNFPYHRLALKEGAMVMMLRNLNQTMGLFNGTRLLISQLGQRVLRCIILTGSRIGDEMAEVLIGSLIIGNCSDRLCIRVSRMWEFYDPQDESKLLHADMVLIDEEGGSAHAQIYPPLAVVFKPMIKEGNVYRVSYVQIKKANRMYKHVDNDIMIGFTKWMTVEALIEVPPAFPELVYSLTPFDQLTTLVDIREYFIGT

SEQ ID NO: 82335 - protein, 358 aa, Zea mays
  Coding DNA Sequence Number=SeqID_40556
  Gene Ontology: Mol. function=helicase activity
  Homolog annotation: Hit_ID=Q8H862; Match level="QueryCoverage=58%, HitCoverage=55%, E-value=3e-30, Identity=30%"; Hit description =Putative DNA binding protein
MVHQQHIVFRVFIRTGIPNRIPLELWKRSRFSEGKRKGKGNARILASKEKKKNSTAKFGALQIGFTKWTTIEALIEVPPAFPEIVYSLTPFDQLTTLVDIREYFIDVIGAVTMISDVATIRTKMRQTQTAKRSVTIQNESCTPLEVVLWGEQATSFPADQISIAGQDSLQIIIFVGTLARSYAGSRGNKPCSQKVEWLVTVTVLKIDQLWWYRLLITAGDETGETDFIVFGRMAQRIVKKPLDILIADNPPGFIPDEITKLMEKVYTFNVNTVVAEIGDGGQVPISPSGSQPSSISSARAASKSTSADSVPTGGISSQTPQSTKNYGKDKTWLKFATLDLQIITLQPNVPFCRYTQLV

SEQ ID NO: 82336 - protein, 235 aa, Zea mays
  Coding DNA Sequence Number=SeqID_40557
  Gene Ontology: Mol. function=metalloendopeptidase activity; Cellular component=membrane; Biological process=proteolysis
  Homolog annotation: Hit_ID=Q94DI2; Match level="QueryCoverage=50%, HitCoverage=37%, E-value=8e-56, Identity=90%"; Hit description =Peptidase M48-like
  Pfam annotation: Domain name=Peptidase_M48; Domain location=55-203; Score=-13.3; E_value=0.00091; Accession=PF01435.8; Description =Peptidase family M48
  Pfam annotation: Domain name=Peptidase_M56; Domain location=87-184; Score=-27.9; E_value=0.0095; Accession=PF05569.2; Description=BlaR1 peptidase M56
  Pfam module annotation: Pfam domain module=Peptidase_M48::Peptidase _M56; Domain location=55-203::87-184
MEMATITVDMETRVVPPLAAWILSAFSSSPLLSLCSGRYMNGRTQDDHYQGLKGLDPTAMLLNTEAPDLYIRQNPVPNAYTLAINGKKPFIVVHTSLVELLTPRELQTVLAHELGHLKCDHGVWLTFANILTMGAYTVPGFDMVAGFLEEQLYRWLRAAELTCDRAALVVQDPKCPKWFNVSMFCFVLGAEMENQRALKGIIPAKRMLFRAMAATSVATDEIAAAGKGRSNQANR

SEQ ID NO: 82337 - protein, 103 aa, Zea mays
  Coding DNA Sequence Number=SeqID_40558
  Homolog annotation: Hit_ID=Q94DI2; Match level="QueryCoverage=40%, HitCoverage=13%, E-value=1e-14, Identity=93%"; Hit description =Peptidase M48-like
MGAYTVPGFDMVAGFLEEQLYRWLRAAELTCDRAALVVQDPKCPKWFNVSMFCFVLGAEMENQRALKGIIPAKRMLFRAMAATSVATDEIAAAGKGRSNQANR

SEQ ID NO: 82338 - protein, 150 aa, Zea mays
  Coding DNA Sequence Number=SeqID_40559
MGDGGLTCSSLDQRVCRTMAGIEGRTGAVHRDGWRARWSGDGTSLDFFFGQGSGENRELGHGAAGGWVPLERGPGVGSSASEQRGPADRACRAQLGAALRSSGWSRREGAQGEEPWTALELKRRAMGGRAPAGSLHRGGEWRETQGACVG

SEQ ID NO: 82339 - protein, 263 aa, Zea mays
  Coding DNA Sequence Number=SeqID_40560
MDSLNIINAGKTARTTGFSPRVDGITDGAAHNTLFLTGIPSNNQGALKRTARALSYGMEAGAPWRLLPLLGVLEGGLLCAMEVAKGNSTGWLGQQAWCCAARCWLLTGKQGIGHGRRRPHLLELRSEGVPHHGWNRGEDGHRAQGWMAGALVWRWDLAGFFFWAGSGENRELGHGAAGGWVPLERGPGVGSSASEQRGPADRACRAQLGAALRSSGWSRREGAQGEEPWTALELKRRAMGGRAPAGSLHRGGEWRETQGACVG

SEQ ID NO: 82340 - protein, 51 aa, Zea mays
  Coding DNA Sequence Number=SeqID_40561
MSKTGGSRLSKTVAILAKGSKINIARGYCWGPSASEGPQKRDLTMFSKYAS

SEQ ID NO: 82341 - protein, 88 aa, Zea mays
  Coding DNA Sequence Number=SeqID_40562
  Subcellular localization annotation: CTP_CleavageSite=27; ConfidenceScore=5.05e-01
MSKTGGSRLSKTVAILAKGSRQVRMPRTKNVSAPGGGDDEDPPRPFRKVNGKTVYLEQQEGRKKRRLDRTARAALAARTSAEQAKRGD

SEQ ID NO: 82342 - protein, 83 aa, Zea mays
  Coding DNA Sequence Number=SeqID_40563
MELKSLSQRIECVKLESWSLRMFLVENWSKVGMSESEFQTAMSETEDFYAEATLEACWWLIHMAMDYNLCTKVEYHMLGYKFG

SEQ ID NO: 82343 - protein, 311 aa, Zea mays
  Coding DNA Sequence Number=SeqID_40564
  Subcellular localization annotation: CTP_CleavageSite=78; ConfidenceScore=5.55e-01
FNGQPLVFSPTRPSPCSQQPPGAAEAVVSRAQATEPRLPDAPRACASSPTPTRPRADRASSRSLGTTRLSQRSCRDARAHEAERRQKSHPASARTRPSPTRPRQAAPGPSPAQPRDRPFFSPRYGVYCSRFFPINGDSFFSITSFWRRSPFPAPIKLDVVSLRTDSRRLLHASLLCCSPRGVVPLYRRPTLCSYLTVVFLPRCWDSSASTTCCYTAVSTALLTSSTVNPRQISQFASVVPISYASVSRAVARLAVILRLVEICHASLSPVRLLVPSIQLVEAMYEFHVKTFYSLTTEAATACCATNTRLRR

SEQ ID NO: 82344 - protein, 166 aa, Zea mays
  Coding DNA Sequence Number=SeqID_40565
  Subcellular localization annotation: CTP_CleavageSite=54; ConfidenceScore=5.03e-01
MADFDEAKNDGQASNSTTDAGVGDRHNTGKLRNLARVDSARRCDFWRRSASWARASRQERWDRRVVPSERLEARSARGLVGVGLDAQALGASGRRGSVAWARLTTASAAPGGCCEQGDGLRSVVRGEDTQQLASSSSGMDGGYTVEGAEETLEIEETYCQMGPTTM

SEQ ID NO: 82345 - protein, 207 aa, Zea mays
  Coding DNA Sequence Number=SeqID_40566
  Homolog annotation: Hit_ID=O22424; Match level="QueryCoverage=41%, HitCoverage=24%, E-value=4e-13, Identity=54%"; Hit description=40S ribosomal protein S4
  Pfam annotation: Domain name=KOW; Domain location=156-193; Score =23.8; E_value=0.0006; Accession=PF00467.19; Description=KOW motif
MGRLTGCEDCDATGFGDLGRKEKTIPDALQPELGKGLLIAHGSHQELGKGDSMTNLMINMCDVLIPYMNLQRHVLVDGKVRTDKTYPAGFMGMPISLLMHKDTYTPILVADLWCHFFGRCHFHSLRQTRTTCCFRLHPIRDEDAKFKLCNGRSIQFDVGNVVMVTGGRNTGRVGVIKNWEKHKGIFEENIEWNSNLVVAKVWRLEFI

SEQ ID NO: 82346 - protein, 66 aa, Zea mays
  Coding DNA Sequence Number=SeqID_40567
  Homolog annotation: Hit_ID=Q10LJ3; Match level="QueryCoverage=86%, HitCoverage=6%, E-value=4e-12, Identity=62%"; Hit description=JmjC domain containing protein, expressed
MGRLTSCEDYDATGFGNLGRKEKTIPDALQPELGKGLLIAHGSHQELGKGDSMTNLMINMCDVVHM

SEQ ID NO: 82347 - protein, 167 aa, Zea mays
  Coding DNA Sequence Number=SeqID_40568
  Subcellular localization annotation: CTP_CleavageSite=46; ConfidenceScore=5.37e-01
MTTGAPLPRPLGSSWPQGPSFFDFHGRSYPFGHCARRLSGKPRWLSGGSGRALETERQRLGDWCSQLEERTKAVSCHFASKRAEFEQEREDFKEDIQKVSDREDEVIRKEKSLARKEKQRVKQAAAEVKLQKLQQELADRASDIARAEGSLKAGEASLAKRAAGLTR

SEQ ID NO: 82348 - protein, 320 aa, Zea mays
  Coding DNA Sequence Number=SeqID_40569
  Subcellular localization annotation: CTP_CleavageSite=64; ConfidenceScore=5.31e-01
MTTGAPLPRPLGSSWPQGPSFFDFHGRSYPFGHCARRWVWLPAAYTSQGRCRRSVSGYCIFSISVGAKSSIGSGRRGSHYTCLHRAGWRWCWDGATRPQDSPVTVKAAPSGPRVLAEGLEVTLLPTSAEGLAAGIPSDAPSVIGMGGAPSSVPPPTPGSPEVILGRPLRSGTESEATLTPLPRVLSRSHQALWETEVAIRREWEALETERQRLGDWCSQLEERTKAVSCHFASKRAEFEQEREDFKEDIQKVSDREDEVIRKEKSLARKEKQRVKQAAAEVKLQKLQQELADRASDIARAEGSLKAGEASLAKRAAGLTR

SEQ ID NO: 82349 - protein, 249 aa, Zea mays
  Coding DNA Sequence Number=SeqID_40570
MEKRGKLGGERAEQLGNNAEAKPPRMGDPPSRDGSSHAPKKPAQREEQTAARSHAASGAAAGKYPWHGRGPQGAPRARGTTELPCMGGHVLVYRKDGRDGWELTQEEGCGPTCRLASSPEVGPGGTIGTLKQGPGPAAWKALDPVPRERTSRTDPGPFQMWFGRFTTGSQILGAGNTRDATPALSQREMCPSAFNASSPLRLQTVSDSAPVQSIIKQHAYAMWRTMLVVPSARKLPQHAKGTQISSVRA

SEQ ID NO: 82350 - protein, 119 aa, Zea mays
  Coding DNA Sequence Number=SeqID_40571
MEKRGKLGGERAEQLGNNAEAKPPRMGDPPSRDGSSHAPKKPAQRVPNARATQSLTKKPGTASRMAGALVSVRRKNKPPHAPTPPRGPLLENILGMGGAHRAPHARGAQPNCHAWGATC

SEQ ID NO: 82351 - protein, 56 aa, Zea mays
  Coding DNA Sequence Number=SeqID_40572
MAENTRYHFAYDFSSRDPEFSDNEQLVVPECVAEDLPEQQPGEGKCPLTYYVLHTL

SEQ ID NO: 82352 - protein, 121 aa, Zea mays
  Coding DNA Sequence Number=SeqID_40573
MLTHSAPLPSLELDRSLSHSIASPRSRDSSLELPPTRPELSLRGSPISGPDLVARTPPITGYRFAHVRPAPGPTYRSLMPLALGPTDDEKLVVPECVAEDLPEQQPGEGKCPLTYYVLLTL

SEQ ID NO: 82353 - protein, 108 aa, Zea mays
  Coding DNA Sequence Number=SeqID_40574
MEELGEGAMGADPCCWRWKKGGAMGRELPALALNQRRRGEEKWRVEDGKERGGLPFIELELWTCQVAVSSGRWKNVNIGRPFLAFSVCFLTLVAVEDFFFDVHSTNLV

SEQ ID NO: 82354 - protein, 68 aa, Zea mays
  Coding DNA Sequence Number=SeqID_40575
  Subcellular localization annotation: CTP_CleavageSite=56; ConfidenceScore=5.34e-01
MASPFFHLRQQGSAPMAPSPSSMAMALPASPIAQQQARLWYCAREGDPSMAASKICSSSAPNGFKILK

SEQ ID NO: 82355 - protein, 300 aa, Zea mays
  Coding DNA Sequence Number=SeqID_40576
MKSSTIPWFGERRDEGAGTSQPINTGSKTDAPTVVTEAAAGGGGQRWLSAQVSFPRPPTRASSSLSIPSPPCSPLSLPFVGIGWGSPLDLWSPAMDPVVPARDPSEVRCCLGATARGCRGSPPELAGGLAAQLAVKVAAAAPSCPWLAHGGGGRPLRQLAYGWVRACVAGPAAASAHRCCSGVGGVSGLRACAADAQKAGSGAREVGGLRVPASEASTGWFRRDAVKARSIADRRRWRHGDVTPFLKASLLKFVSATRLCLRLLLRFSAPGLRVENVSKVGQKPEAGQRVKIGSQSLSVP

SEQ ID NO: 82356 - protein, 261 aa, Zea mays
  Coding DNA Sequence Number=SeqID_40577
MKSSTIPWFGERRDEGAGTSQPINTGSKTDAPTVVTEGRGKKALTSLCLGRLGGDQAVPPPVPSTLALDSRCRRWRPAVAVGPSQLPATSHSCLLFSLYPLPTLLSSLPPLRRHRVGLAFGSVVPCHGSSRPRTGPIRSSLLPRGYCAWLSWLAAGASWWVGRAASGEGGSGGAIVPLGWPTAAAAAHLGSWPTAGCAPAWLARRQRPPIAAARGLEVCLVCVLAQLMHRRLDLARARLAASACQRRRRRQAGPEPSHEPG

SEQ ID NO: 82357 - protein, 368 aa, Zea mays
  Coding DNA Sequence Number=SeqID_40578
  Gene Ontology: Mol. function=hydrogen-translocating pyrophosphatase activity; Cellular component=integral to membrane; Biological process=proton transport
  Homolog annotation: Hit_ID=Q06572; Match level="QueryCoverage=59%, HitCoverage=29%, E-value=1e-111, Identity=92%"; Hit description =Pyrophosphate-energized vacuolar membrane proton pump (EC 3.6.1.1) ...
  Homolog annotation: Hit description=(Pyrophosphate-energized inorganic pyrophosphatase) (H(+)-PPase)
  Pfam annotation: Domain name=H_PPase; Domain location=2-354; Score= -29.5; E_value=6.3e-23; Accession=PF03030.7; Description=Inorganic H+ pyrophosphatase
  Subcellular localization annotation: CTP_CleavageSite=33; ConfidenceScore=5.62e-01
MPFCLLPFPPVPSTPSPKGGCGKDRCAFSHATRASSSSSGPPLQRRHWFWGFFFQALLYGVAWASWVPYFSSSLGIIYVLAKPAIYAIISGEVLSTDQGKAQGFIATVQSITILLAPQFMSPLTSYFISKEAPFDCKGFSFIVASFFLGFAIGSAALVSLALFGAFISRAGVKVVHVLSPKVFIGLIVGAMLPYWFSAMTMKSVGSVALKMVEEVRRQFNTIPGLMEGTAKPDYATCVKISTDASIKEMIPPGALVMLTPLIVGTLFGVETLSGVLAGALIAIFAPNIGGAWDNAKKYIEAGASEHARTLGPKGSDCHKAAVIGDTIGDPLKDTLGPSLNILIKLMAVESLVFAPFFATHGGLLFKYL

SEQ ID NO: 82358 - protein, 368 aa, Zea mays
  Coding DNA Sequence Number=SeqID_40579
  Gene Ontology: Mol. function=hydrogen-translocating pyrophosphatase activity; Cellular component=integral to membrane; Biological process=proton transport
  Homolog annotation: Hit_ID=Q06572; Match level="QueryCoverage=59%, HitCoverage=29%, E-value=1e-111, Identity=92%"; Hit description =Pyrophosphate-energized vacuolar membrane proton pump (EC 3.6.1.1) ...
  Homolog annotation: Hit description=(Pyrophosphate-energized inorganic pyrophosphatase) (H(+)-PPase)
  Pfam annotation: Domain name=H_PPase; Domain location=2-354; Score= -29.5; E_value=6.3e-23; Accession=PF03030.7; Description=Inorganic H+ pyrophosphatase
  Subcellular localization annotation: CTP_CleavageSite=33; ConfidenceScore=5.62e-01
MPFCLLPFPPVPSTPSPKGGCGKDRCAFSHATRASSSSSGPPLQRRHWFWGFFFQALLYGVAWASWVPYFSSSLGIIYVLAKPAIYAIISGEVLSTDQGKAQGFIATVQSITILLAPQFMSPLTSYFISEEAPFDCKGFSFIVASFFLGFAIGSAALVSLALFGAFISRAGVKVVHVLSPKVFIGLIVGAMLPYWFSAMTMKSVGSVALKMVEEVRRQFNTIPGLMEGTAKPDYATCVKISTDASIKEMIPPGALVMLTPLIVGTLFGVETLSGVLAGALIAIFAPNIGGAWDNAKKYIEAGASEHARTLGPKGSDCHKAAVIGDTIGDPLKDTLGPSLNILIKLMAVESLVFAPFFATHGGLLFKYL

SEQ ID NO: 82359 - protein, 118 aa, Zea mays
  Coding DNA Sequence Number=SeqID_40580
  Homolog annotation: Hit_ID=Q5K3Q1; Match level="QueryCoverage=28%, HitCoverage=4%, E-value=9e-09, Identity=79%"; Hit description=Beta -galactosidase
MMTQLGSERLQLLISDCSDQWEVLEKENINSVKDGKSSENARYSPWEHWHVLGDRGSVTYNSNLRKRVLRKHVNKGNNHTSSVTPNNGDRTASHIVLIPSEDHCFVFARVIIGKEREA

SEQ ID NO: 82360 - protein, 899 aa, Zea mays
  Coding DNA Sequence Number=SeqID_40581
  Gene Ontology: Mol. function=beta-galactosidase activity; Cellular component=beta-galactosidase complex; Biological process =carbohydrate metabolic process
  Homolog annotation: Hit_ID=Q5LJJ2; Match level="QueryCoverage=91%, HitCoverage=95%, E-value=0.0, Identity=78%"; Hit description =Putative beta-galactosidase
  Pfam annotation: Domain name=Gal_Lectin; Domain location=769-847; Score=74.5; E_value=3.4e-19; Accession=PF02140.8; Description =Galactose binding lectin domain
  Pfam annotation: Domain name=Glyco_hydro_35; Domain location=42-348; Score=522.4; E_value=5e-154; Accession=PF01301.10; Description =Glycosyl hydrolases family 35
  Pfam annotation: Domain name=Glyco_hydro_42; Domain location=63-412; Score=-232.6; E_value=0.0051; Accession=PF02449.6; Description=Beta -galactosidase
  Pfam module annotation: Pfam domain module=Gal_Lectin::Glyco_hydro _35::Glyco_hydro_42; Domain location=769-847::42-348::63-412
MTVRAAAVLVATAALALLLPGWAAAEWSLTKKGSVVTYDGRSLMIDGKRDLFFSGAIHYPRSPPEMWPKLIERAKEGGLNTIETYIFWNAHEPEPGKYNFEGRFDLIKYLKMIQEHDMYAIVRIGPFIQAEWNHGGLPYWLREIDHIIFRANNDPYKKEMEKFVRFIVQKLKDAELFASQGGPIILTQIENEYGNIKKDHATDGDKYLEWAAQMALSTQTGVPWIMCKQSSAPGEVIPTCNGRHCGDTWTLRDKNKPMLWTENWTQQFRAYGDQVAMRSAEDIAYAVLRFFAKGGSLVNYYMYHGGTNFGRTGASYVLTGYYDEAPMDEYGMYKEPKFGHLRDLHNVIRSYQKAFLWGQHSSEILGHGYEAHIFELPEEKLCLSFLSNNNTGEDGTVIFRGDKHYVPSRSVSILAGCKNVVYNTKRVFVQHSERSFHTSDVTSKNNQWEMFSETIPKYRDTKVRTKEPLEQYNQTKDDTDYLWYTTSFRLESDDLPFRNDIRPVLQVKSSAHAMMGFANDAFVGCARGNKQVKGFMFEKPVDLKVGVNHVVLLSSTMGMKDSGGELAEVKGGIQECLIQGLNTGTLDLQVNGWGHKAALEGEYKEIYSEKGLGKVQWKPAENDRAATWYKFWLQPSPSVSLCSLPCQRYFDEPDGDDPVVLDMSSMSKGMIFVNGEGVGRYWVSYRTLAGTPSQAVYHIPRPFLKSKDNLLVIFEEEMGKPDGILVQTVTRDDICLFISEHNPGQIKTWDTDGDKIKLIAEDHSRRGTLTCPPEKTIQEVVFASFGNPDGMCGNFTVGTCHTPNAKQIVEKECLGKPSCMLPVDHTVYGADINCQSTTATLGVQSWRTGFFGRMMRQIVHHTIYASVKIFVMMRPTKQELYLTCKQPNNSLLYEASLAI

SEQ ID NO: 82361 - protein, 86 aa, Zea mays
  Coding DNA Sequence Number=SeqID_40582
MPWKWDRHTLESLFFSRVAYLKTTNPQPGVMHTCVLLLFGPFSSEWIDAQIWNLVPHGCVWVYRYGNTEKCNVLATTHLRLGKKVH

SEQ ID NO: 82362 - protein, 62 aa, Zea mays
  Coding DNA Sequence Number=SeqID_40583
MAKMDSTSEKMYLYQRHPLLSPKLRTIRWLSSKPLTHNRGHGNTEKCNVLVTTHLRLGKKVH

SEQ ID NO: 82363 - protein, 228 aa, Zea mays
  Coding DNA Sequence Number=SeqID_40584
MDVYGYTDMGILRSVMYLQRCTYAQVRRWSISLYIVILAQSSCVVRDFLLDTSVEALKLFSVERQLISPSTKKSIPLLLRCRSCFTLSELIHVFPNQVSSSRMKKQMNNLTKWISTQVHDLLLTKVNSQPLAYRWYCEDLLNVNVTELPLDAQSSGRRLDVDERVEQCRAVAGVLHVLARFVQVLQMQHLRGIHTYREEAPRTELLGSRRRLGEGERWAAAISSQVAN

SEQ ID NO: 82364 - protein, 148 aa, Zea mays
  Coding DNA Sequence Number=SeqID_40585
MQELFTLSELIHVFPNQVSSSRMKKQMNNLTKWISTQVHDLLLTKVNSQPLAYRWYCEDLLNVNVTELPLDAQSSGRRLDVDERVEQCRAVAGVLHVLARFVQVLQMQHLRGIHTYREEAPRTELLGSRRRLGEGERWAAAISSQVAN

SEQ ID NO: 82365 - protein, 211 aa, Zea mays
  Coding DNA Sequence Number=SeqID_40586
  Gene Ontology: Mol. function=isomerase activity; Cellular component =endoplasmic reticulum; Biological process=cell redox homeostasis
  Homolog annotation: Hit_ID=Q5EUD6; Match level="QueryCoverage=55%, HitCoverage=64%, E-value=8e-51, Identity=66%"; Hit description =Protein disulfide isomerase
  Pfam annotation: Domain name=Thioredoxin; Domain location=78-169; Score=106.8; E_value=6.2e-29; Accession=PF00085.10; Description =Thioredoxin
MDRYLRVERPRNESTIEENGIRITAQGLIRNYASYATSLLQSRPCLFEEIPSNVREVFLTGATSKLGRAIALYLCRKKIRVLMFTVFQVPMCGHCKHLAPIYEKLASVFKQDDGVVIANLDADKHTDLAEKYGVSGFPTLKFFPKGNKVGEDYDGGRDLDDFVKFINEKCGTSRDPKGHLTSEVGYKAKRNRFGIKLMNSGSDAFCSFFAV

SEQ ID NO: 82366 - protein, 332 aa, Zea mays
  Coding DNA Sequence Number=SeqID_40587
  Gene Ontology: Mol. function=isomerase activity; Cellular component =endoplasmic reticulum; Biological process=cell redox homeostasis
  Homolog annotation: Hit_ID=Q5EUD6; Match level="QueryCoverage=91%, HitCoverage=98%, E-value=1e-173, Identity=82%"; Hit description =Protein disulfide isomerase
  Pfam annotation: Domain name=AhpC-TSA; Domain location=107-221; Score= -18.5; E_value=0.028; Accession=PF00578.11; Description=AhpCTSA family
  Pfam annotation: Domain name=ERp29; Domain location=237-331; Score =172.0; E_value=1.5e-48; Accession=PF07749.3; Description=Endoplasmic reticulum protein ERp29,
  Pfam annotation: Domain name=Thioredoxin; Domain location=115-221; Score=200.7; E_value=3.3e-57; Accession=PF00085.10; Description =Thioredoxin
  Pfam annotation: Domain name=Thioredoxin; Domain location=15-102; Score=65.4; E_value=1.9e-16; Accession=PF00085.10; Description =Thioredoxin
  Pfam module annotation: Pfam domain module=AhpC-TSA::ERp29::Thioredoxi n::Thioredoxin; Domain location=107-221::237-331::115-221::15-102
MEDHRLLPLDRLCSRRKTCRCSESVATAKKLAPEYEKLGASFKKAKSVLIAKVDCDEHKSVCSKYGVSGYPTIQWFPKGSLEPKKYEGQRSVEALAEFVNSEAGTNVKIAAIPSSVVVLTSETFDSIVLDETKDVLVEFYAPWCGHCKHLAPIYEKLASVFKQDDGVVIANIDADKHTDLAEKYGVSGFPTLKFFPKGNKAGEDYDGGRDLDDFVKFINEKCGTSRDPKGHLNQEAGLVPSLNPLVKEFLNAADDKRKEVLSKIEEDVAKLSGSAAKHGKIYVTAAKKIIDKGSDYTKKETERLHRMLEKSISPSKADEFIVKKNILSIFSS

SEQ ID NO: 82367 - protein, 439 aa, Zea mays
  Coding DNA Sequence Number=SeqID_40588
  Gene Ontology: Mol. function=nucleoside-triphosphatase activity; Cellular component=endoplasmic reticulum; Biological process=ER to Golgi vesicle-mediated transport
  Homolog annotation: Hit_ID=Q40495; Match level="QueryCoverage=57%, HitCoverage=18%, E-value=7e-56, Identity=79%"; Hit description=N -ethylmaleimide sensitive fusion protein
  Pfam annotation: Domain name=AIG1; Domain location=76-216; Score= -101.1; E_value=0.046; Accession=PF04548.7; Description=AIG1 family
MDDLTKPLDEESIKVTMDDFVSALHEITPAFGASTDDLERCRLRGIVDCGKAHKHIYQRAMLLVEQVKVSKGSPLVTCLLEGPTGSGKTAMAASVGIDSDFAYVKIISAETMIGFSESSKCAQICKITMDDLTKPLDEESIKVTMDDFVNALHEITPAFGASTDDLERCRLRGIVDCGKAHKHIYQRAMLLVEQVKVSKGSPLVTCLLEGPTGSGKTAMAASVGIDSDFAYVKIISAETMIDFSESSKCAQVCKKGYFSGESKKHSDVFRDISELDFFPYATDSDSEELELKEQKPVLKAQSGGDSSGNSSNDCYFPGLHDDLSQDCLAWASRSDHPSLSCLNKRFNLLMNNGYLYKLQRKYNIIEHWVYLTCSLMPWEAFDPSQRRPVPQVNRKSSWVIAVSDSSAHRASNASDSCVSLPPFSWASLVSNEVHWRFAS

SEQ ID NO: 82368 - protein, 136 aa, Zea mays
  Coding DNA Sequence Number=SeqID_40589
  Subcellular localization annotation: CTP_CleavageSite=41; ConfidenceScore=5.23e-01
MINPVPQVNRKSSWVIAVSDSSAHRAINASDSCVSLPPFSWASLVSNKVHWSDLRVPGRGSSEDLAVDPRVRGQPARSAAGVLAREEQAQLRYYRNRDGCPDHVRRNYVPNSSSMATDDIVVPFSWAKTSIKTTTG

SEQ ID NO: 82369 - protein, 124 aa, Zea mays
  Coding DNA Sequence Number=SeqID_40590
MPRKRQRLVRQKGRKAPRGEGSEEGRKPRPRPRSGQFLHLASLCTLYLGFWRFPDNATLPQGYAFTVQTSDFAAPQPFKILGLAPCLPSTVISIPADSMPSNDLAGLYGALLTTLFRAIIYLIT

SEQ ID NO: 82370 - protein, 235 aa, Zea mays
  Coding DNA Sequence Number=SeqID_40591
  Homolog annotation: Hit_ID=Q2QXL4; Match level="QueryCoverage=19%, HitCoverage=6%, E-value=6e-14, Identity=84%"; Hit description=Rf1 protein, mitochondrial, putative, expressed
  Subcellular localization annotation: CTP_CleavageSite=33; ConfidenceScore=5.25e-01
MRTAANAEAERGKPHGVVSAHRNSWRARPGRPRSAEWTSPVASTWRRGSGGGGSEARSAANGFSSCRGGGGGTSAGREEEKRMLEMAATTAATGACALQCGMLNSMDYGSCTARRRLAMNDGVAAARRNLWQFAAAHPLDSGARSGQFLHLASLCTLYLGFWRFPDNATLPQGYAFTVQTSDFAAPQPFKILGLAPCLPSTVISIPADSMPSNDLAGLYGALLTTLFRAIIYLIT

SEQ ID NO: 82371 - protein, 69 aa, Zea mays
  Coding DNA Sequence Number=SeqID_40592
  Gene Ontology: Biological process=protein folding
MAARAIAEREDVVARLEGDKAGLEKLLAEREKEQAQEIESLRRFKLEEEIIDAEYTLTCDRIVSLKDKR

SEQ ID NO: 82372 - protein, 127 aa, Zea mays
  Coding DNA Sequence Number=SeqID_40593
  Gene Ontology: Biological process=protein folding
MSPPDFALPMPMLAPPPPPPSQFPMVDQVAQLREEVELKKLAQDKYRRKLTKIQKTSAPPVDEIESLRRFKLEEEIIDAEYTLTCDRIVSLKDKDSGSHQVTPPPHDNFADKCLNSSGGATNNNPMS

SEQ ID NO: 82373 - protein, 227 aa, Zea mays
  Coding DNA Sequence Number=SeqID_40594
  Gene Ontology: Mol. function=zinc ion binding; Cellular component =integral to membrane; Biological process=protein transport
  Homolog annotation: Hit_ID=P93043; Match level="QueryCoverage=99%, HitCoverage=27%, E-value=2e-85, Identity=62%"; Hit description =Vacuolar protein sorting-associated protein 41 homolog
MADSLKESLAELYVINGQYEKALSLYAELLKPEVFEFIEKYNLYDAIHDKIVNLMIVDNKRTVHLRTQHRDIILPYEVVEQLLHTSKKCDKRYLLHLYLHALFEIDIHAGKDFHDMQVELYADYETRMLLPFLLTSQHYRLDKAYEIFAQKELAVEFVTEQHDDELWEELIRQCLQKPEMVGNLLEHTVGNLDPLYIVSLVPDGLEIPRLQDRLVKIVTDYRTETSL

SEQ ID NO: 82374 - protein, 251 aa, Zea mays
  Coding DNA Sequence Number=SeqID_40595
  Gene Ontology: Mol. function=zinc ion binding; Cellular component =integral to membrane; Biological process=protein transport
  Homolog annotation: Hit_ID=P93043; Match level="QueryCoverage=88%, HitCoverage=26%, E-value=6e-83, Identity=61%"; Hit description =Vacuolar protein sorting-associated protein 41 homolog
LKMFAVAKRISNKILVELKFLHQIIFGRLRKSLAELYVINGQYEKALSLYAELLKPEVFEFIEKYNMYDAIHDKIVNLMIVDNKRTVHLRTQHRDIILPYEVVEQLLHTSKKCDKRYLLHLYLHALFEIDIHAGKDFHDMQVELYADYETRMLLPFLLTSQHYRLDKAYEIFAQKELAVEFVTEQHDDELWEELIRQCLQKPEMVGNLLEHTVGNLDPLYIVSLVPDGLEIPRLQDRLVKIVTDYRTETSL

SEQ ID NO: 82375 - protein, 129 aa, Zea mays
  Coding DNA Sequence Number=SeqID_40596
  Gene Ontology: Mol. function=zinc ion binding; Cellular component =integral to membrane; Biological process=protein transport
  Homolog annotation: Hit_ID=P93043; Match level="QueryCoverage=99%, HitCoverage=16%, E-value=4e-50, Identity=62%"; Hit description =Vacuolar protein sorting-associated protein 41 homolog
MHALFEIDIHAGKDFHDMQVELYADYETRMLLPFLLTSQHYRLDKAYEIFAQKELAVEFVTEQHDDELWEELIRQCLQKPEMVGNLLEHTVGNLDPLYIVSLVPDGLEIPRLQDRLVKIVTDYRTETSL

SEQ ID NO: 82376 - protein, 193 aa, Zea mays
  Coding DNA Sequence Number=SeqID_40597
  Gene Ontology: Mol. function=zinc ion binding; Cellular component =integral to membrane; Biological process=protein transport
  Homolog annotation: Hit_ID=P93043; Match level="QueryCoverage=93%, HitCoverage=22%, E-value=4e-63, Identity=58%"; Hit description =Vacuolar protein sorting-associated protein 41 homolog
MEESNLAANTKLHSTVIVNLMIVDNKRTVHLRTQHRDIILPYEVVEQLLHTSKKCDKRYLLHLYLHALFEIDIHAGKDFHDMQVELYADYETRMLLPFLLTSQHYRLDKAYEIFAQKELAVEFVTEQHDDELWEELIRQCLQKPEMVGNLLEHTVGNLDPLYIVSLVPDGLEIPRLQDRLVKIVTDYRTETSL

SEQ ID NO: 82377 - protein, 68 aa, Zea mays
  Coding DNA Sequence Number=SeqID_40598
MKSICDLDKTPGPSRQVKYDNLELLLYSVNCLVMRFLFYLVNCVVLRTHCSSFCIKCSSDEEILLSLS

SEQ ID NO: 82378 - protein, 264 aa, Zea mays
  Coding DNA Sequence Number=SeqID_40599
  Homolog annotation: Hit_ID=Q8LJT5; Match level="QueryCoverage=43%, HitCoverage=12%, E-value=6e-13, Identity=46%"; Hit description =Sucrose synthase
MVKNFGRKTVQIAMNAVVTSHLLVCLYSAAGEQYPRTVHVDLAFAFASHLYFHLLPSRRMKRSTRCSAVPRDQKVVYILGQVRAMDNEMLLRIKQYGLDMMPKILILSVMANMVTRLLLDATGPTCGQHLEKDRKWNHSQVEHLQYILIRSKCLAAYKKLSSNEVSRWVVERMDNVECHVTRLVGTPRWKFFISKIMKSICDLDKTPGPGRQVKYDNLELLLYSVNCLVMRFLFYLVNCVVLRTHCSSFCIKCSSDEEILLSLS

SEQ ID NO: 82379 - protein, 187 aa, Zea mays
  Coding DNA Sequence Number=SeqID_40600
MSWGHIACQKGGQAACPLRNKCGGRAAQSPYVMLRSLAYVTDNKPCGSIRPSSEWGAEALSMEPGHASIPDPCLGHGTSSLGTLLWVVRSSLSGVRTLSNGFGLLYFRGLGCAYRGHVPSGSDGVVSENATLTAHEILVRLFSARLRVAAQASCLHTVARGTPNARYRQWPRARLRGGCEPAGGARV

SEQ ID NO: 82380 - protein, 120 aa, Zea mays
  Coding DNA Sequence Number=SeqID_40601
MWAQGHSDYSTWRHKRLLQVQSSSALTPEISVSSEKVPLIKGTDSGPRPASGEDASLQVGPESDWRSVCCSCAPVGAITVAPPMATPTVTPVPTTDWPVTFVFNITVEPCAGCLESLHRF

SEQ ID NO: 82381 - protein, 173 aa, Zea mays
  Coding DNA Sequence Number=SeqID_40602
MPATLTALPSHGRWMDAGWGLGVPRLPLVVVGHKRAKARSNQAWAAPAGPVRPIIDQRAGTHLGPSGAEKNLVQHCCKSECLQPLTKWRIDPTRSNNNITKTLSAGPAGYEFGSISLPMGLLMGSNGNPMVGMGNSLGIRNPYGYEFGQNFIPVMGIDFLADVFFFADTGLDK

SEQ ID NO: 82382 - protein, 55 aa, Zea mays
  Coding DNA Sequence Number=SeqID_40603
MGLLMGSNGNPMVGMGNSLGIRNPYGYEFGQNFIPVMGIDFLADVFFFADTGLDK

SEQ ID NO: 82383 - protein, 162 aa, Zea mays
  Coding DNA Sequence Number=SeqID_40604
MPHNICKEGLRSDTSCDGTSQVIRPTYSCPCLTDIRHPVDVPKSLDKFGIFPYLTRNVSPVLQTLQNIGDKEMRKRLHNLHLFKKQAPVILLRTRSKEMSAEHQYYTDQGRKKGTGKTDTRKGILLCELGGPRDLLLITGSKAGPVGRVDSHCTALMLRAHY

SEQ ID NO: 82384 - protein, 181 aa, Zea mays
  Coding DNA Sequence Number=SeqID_40605
MPHNICKEGLRSDISCDGTSQVIRPTYSCPCLTDIRHPVDVPKSLDKFGIFPYLTRNVSPVLQTLQNIGDKEMRKRLHNLHLLKAILSIEKPFCKNRVSRKVIKFKEASEKDFKNIKGGGKCTGACLRSQNECHVYAHESAKIIKNYYLNLEYNFPSRNSENLGFPESVKELNGQGGVLGF

SEQ ID NO: 82385 - protein, 256 aa, Zea mays
  Coding DNA Sequence Number=SeqID_40606
MKPVVWVRYEPGMTRFYVGPGQLGTNKRAKLGQETRHGAVGDLPPPLRTRGPSGPRARTVRPSGRELELLHQVADRPALCHGPSASDQRAPPPRTRPRTVRPLRADRPPLCRGHRRRFFLSDWRSEKASTVVSLEITTTSMVGVGEEVMGCGVPEHHRVSHCRSLWRGADCGVQLDGWGGSAERSLTGTTARGGGPWPADFRGAEEELVRPGGLGLERAPPSQVGLGVGSLELGLSGTRSPELDAWWNRDRATTNE

SEQ ID NO: 82386 - protein, 93 aa, Zea mays
  Coding DNA Sequence Number=SeqID_40607
MADKGKGKGIVIGDPRMSDISQKEIARKASDEKAKKSEDTGGQAQLMNQTHQHSPNIVDGAVGDLPPSLRTRGPSGPRARTVRPSGREPELQH

SEQ ID NO: 82387 - protein, 236 aa, Zea mays
  Coding DNA Sequence Number=SeqID_40608
MKGRSRGSQRCAGHRRRWPESVGPRAQARMLVGGEESGLRGPRDAREDMSARNWAETHWIAWSTRGGGRPKSGEVDLGPPVKSGRVRGLGKLHGLLAELAEALARPEDGWSGLAMTAEALAAMAGGIELAGAKGKWLACEGECGAKWGAPGKALYAWRGARAVMDRRVHAGVHWEARCANGREPGVSAAVEHVFPLPLPMFKRRLGANLREFGQDRYEGFVHLTKLCLLCMDVARF

SEQ ID NO: 82388 - protein, 154 aa, Zea mays
  Coding DNA Sequence Number=SeqID_40609
MELQVDLSDKLFTKSGALFTGLQKNHAEDKDQPSPAIRTPPQLGMVVGGRGDPNIKVVPNSLEHILEKFELKPNSFGMVLAQLDLGTRHSDTGTLVTLQLPVPSLKPRDVHTQKTKLGLVNKSFTAILPKFTKICSQSALEQGQRQREHVFDRG

SEQ ID NO: 82389 - protein, 94 aa, Zea mays
  Coding DNA Sequence Number=SeqID_40610
MGGSEAAPCPEKVIYSMASTVVRTPKVGPGPLDIQSGPPRLVPNPRIYSPDLRGWSQTSTCASRTPGMESGPQVWGPGRPQRGPKAKGQNIPGP

SEQ ID NO: 82390 - protein, 407 aa, Zea mays
  Coding DNA Sequence Number=SeqID_40611
  Gene Ontology: Mol. function=hydrolase activity
  Homolog annotation: Hit_ID=Q7XHS7; Match level="QueryCoverage=99%, HitCoverage=99%, E-value=1e-130, Identity=62%"; Hit description =Putative transcription factor
  Pfam annotation: Domain name=DCP1; Domain location=19-164; Score =178.5; E_value=1.6e-50; Accession=PF06058.4; Description=Dcp1-like decapping family
MSHGGGGGRAKVTPNLAVDGEGTRTLNLTVLQRLDHAVEDILITAAHVTLYDFDTDINQWSRKDVEGSLFVVKSLLRDTYLDLYICQFQSSMYYLVRNAQPRFQFIVMNRRNTDNLVEDLLGDFEYQLQAPYIMYRNAAQEVIGIWFYNSQECQQVANLFSRILNAFSKVAPKPKIPSVQSEFEELEAAPSLVDGPLEAQTSNIMSTTTHVQEDPLSAFFSAAANVGGNSAVAVARQPIQPFGATPVAAHAATSITTTQSPGLHYLLPSQASSVSGRPADAHGGTGSIGRSTSLVYPSLFSPLTSSQTKMVHTNSAVPTAPPQHPRIAQQPQSAPLLQPFPLPTASSPPYGTPLLQPFPPPNPSPSLASAPVLSPALTRDKVRDALLRLVENDEFVDLVYREIMNRQ

SEQ ID NO: 82391 - protein, 84 aa, Zea mays
  Coding DNA Sequence Number=SeqID_40612
  Gene Ontology: Mol. function=hydrolase activity
  Homolog annotation: Hit_ID=Q7XHS7; Match level="QueryCoverage=87%, HitCoverage=19%, E-value=5e-29, Identity=86%"; Hit description =Putative transcription factor
  Pfam annotation: Domain name=DCP1; Domain location=19-84; Score= -12.9; E_value=0.00052; Accession=PF06058.4; Description=Dcp1-like decapping family
MSHGGGGGRAKVTPNLAVDGEGTRTLNLTVLQRLDHAVEDILITAAHVTLYDFDTDINQWSRKDVEGSLFVVKRFVSSVSDEFA

SEQ ID NO: 82392 - protein, 200 aa, Zea mays
  Coding DNA Sequence Number=SeqID_40613
  Subcellular localization annotation: CTP_CleavageSite=68; ConfidenceScore=5.67e-01
MASPLQSLPSHACPSVSFASDSRSFPSARTRQDLTGDPRSSSPDFGRPPARVDRAIQPDSSPPMSSPACARGPADSDHPRRRPAYRRDAQDLPYTLDHLAEAVSPPIAISLMESTCSSPSKGDVHEEDQEQAPETTIEDLPAAPSIEGKPRFLCIIVSIYATLLHLRSGIDCIHLDNGIYVSLWTWIQGGCLVHDTGKRN

SEQ ID NO: 82393 - protein, 145 aa, Zea mays
  Coding DNA Sequence Number=SeqID_40614
  Subcellular localization annotation: CTP_CleavageSite=41; ConfidenceScore=5.07e-01
MAESSLTCAIVNGVAVCGIHGGAGSRGLAQARRRWCLSMSSASGEEEMVPVGEPSVKRDLSLIKPLNQDQIPQSHAKYKGSSSLISYEKQTIRIEFLNLVRYPHINPQFLFPSHGQGILPGSKSIDHHRSRYQDEYNQFLTSREC

SEQ ID NO: 82394 - protein, 249 aa, Zea mays
  Coding DNA Sequence Number=SeqID_40615
VGQQPMPERTGEIISSVRTANKRFDGEQRPSRVPNRELRARREERRAGKAARDLGAQQGEIVITTNDDDDSGVVNDGEDLAETRRELEQGRGWSLETTGAGRGDQRARELDGSHVEERNAGGGSYGAGSWAAERVGAPGHAVQRAPAASAGARRSGHGRVGARDGVEQRRKLRCADWASAGRGRSELGCGGEALRRSWHNSARDPVNSSTEARRGSMEDMVAGVTWPSTLPPGWTVEWDPASAEEEHEE

SEQ ID NO: 82395 - protein, 107 aa, Zea mays
  Coding DNA Sequence Number=SeqID_40616
  Subcellular localization annotation: CTP_CleavageSite=80; ConfidenceScore=5.42e-01
MAAAPRPCACRWSSLYRVPWSSHALGRPASCAVASSPSVSLLYMAAVELPCALVASPCPSRLQAPAAPLLQFSPGTLISRTMRKKNQVDLKRGLLHMVKLKDERKDG

SEQ ID NO: 82396 - protein, 138 aa, Zea mays
  Coding DNA Sequence Number=SeqID_40617
  Subcellular localization annotation: CTP_CleavageSite=30; ConfidenceScore=5.31e-01
MAAAPRPCACRWSSLYRVPWSSHALGRPASCAVASSPSVSLLYMAAVELPCALVASPCPSRLQAPAAPLLQFSPAAPIAASGLLPCARSTSSPSSYLRAEIACSFPSSSFFPARAKLSVGHARRSLFAIKSLVRCPHR

SEQ ID NO: 82397 - protein, 118 aa, Zea mays
  Coding DNA Sequence Number=SeqID_40618
MASTGREQVRLGWATMARELRRKATAQEAGRPSAWELEGARYRELQRRAQGRGAAAMAELEPGTAPSREGSCGAQTGRAPVEEDPSWGAAGKLHGDHGTTARGIRQGASTVHKEMKDN

SEQ ID NO: 82398 - protein, 210 aa, Zea mays
  Coding DNA Sequence Number=SeqID_40619
MANGPKTDFRPRPRKRARGWARDPPVVPPRETWKFGSTREGKRNSPKSWEGVSSAEPRTPSRPSRGRSAPYRAQLRLALLAAWPAMRLRWRMSCLGPVTAWRTPATVRPTPGARVPSLVWASYACCAEKCLRAATRPTGSRARYTLPSSSSPPGVRLVGSRAPAAFASCRRRPMAGGTEDTSLALLVSDVAHAEGRRRVGVTRPRIGPPE

SEQ ID NO: 82399 - protein, 47 aa, Zea mays
  Coding DNA Sequence Number=SeqID_40620
TPRSPRRGYAPQVSSAEPRTPSRPSRGRSAPYRAQLRLALLAAWPAM

SEQ ID NO: 82400 - protein, 159 aa, Zea mays
  Coding DNA Sequence Number=SeqID_40621
MAVTTVSTSRKRKVGAASLTVRYREGESAHPLRSRPPGGCAGDGVDFGGSRTDRPLSAAASPPLPFSLCPLTCFLLRQPFCPRNVRPIYQRAGWAARPLVLVAAQPGWPFFLIRYLRTQNYEHEVRSGRSLNQTKDGLITKLHEGWCTAEAVRREASSR

SEQ ID NO: 82401 - protein, 73 aa, Zea mays
  Coding DNA Sequence Number=SeqID_40622
MGHGPASEDDDDGDDGSSSKASHTQLMRYLRTQNYEHEVRSGRSLNQTKDGLITKLHEGWCTAEAVRREASSR

SEQ ID NO: 82402 - protein, 239 aa, Zea mays
  Coding DNA Sequence Number=SeqID_40623
MSSSHTPPQLEEEEAITQELPLTTQEDHHPDYILRPGCYLLGLASSSKEANRGEQWQQQGYVLGGNSSVHLASHGHCAGIRPVTQRRPRRARYNGPDHTWASEPNEAALRDGAAAGLRLVPNGAKGVPARLVSVRPATSAKASSEGWAFLPSPQHLPSEGPVRQSHLVPKTSLDGGDAALARSGSAGVFDVTVDGRCTVGLRVSRSVAPCRIAGFPKSRALPIKGGGGWHCLNFAFRAP

SEQ ID NO: 82403 - protein, 404 aa, Zea mays
  Coding DNA Sequence Number=SeqID_40624
MQAACCTMGMHPFDFDASSMEAQAHMSSAGEGATIDMAKSGPAVMAAAGGRKQQSNRLQAHVPSWSSRGALSHGVKTTRPCSVPRTTRARTTAAPRTTRPVALTPRQGRRHLWQAKRATLHLRHDDRVKKGTGKGDTPKGILLREGNGPRALLVIRAALDHSGSAPTTDQGFEGWPPEGFDSRLRTRRARDDSRYVRYMAETRATLQSLRRHRKLRLAPTPGLGPRLGLRRWSPPRPTPGLGLNLDLGRRSPPRPTPGLGPHLGLGRWSPPRPTPGLGLNLDLGRRSPPRPTPGLGLDLNLGGVTTSPDLGLGLTTPQGAPTEARRRQLLELALSSKEANRGEQWRQQGYVHGGNSSVNLASHGHCAGRLSAKASSEGWRLCLRPNICPPRDQFDKVTWCRRRR

SEQ ID NO: 82404 - protein, 72 aa, Zea mays
  Coding DNA Sequence Number=SeqID_40625
MSTARERRRKTRTISLSRSVGRLAGEWAPRDSSLLHRWLFSLTQILGFTNPTPLNRNLVLEICKEKLGGAGG

SEQ ID NO: 82405 - protein, 40 aa, Zea mays
  Coding DNA Sequence Number=SeqID_40626
MEILGLTNPTPLTEISSSRFVRKGCILILSQHKVTILKIL

SEQ ID NO: 82406 - protein, 118 aa, Zea mays
  Coding DNA Sequence Number=SeqID_40627
  Subcellular localization annotation: CTP_CleavageSite=69; ConfidenceScore=5.04e-01
MLSIPRRRSTSDEKSRMLYFTTALDVAVCRSSVTYARSDVVGRGPASRRYPRSTVAAILSLGMAILGVCARGGRNGREDKFYRVEDFGPYKSYPLNRNLVLEICKERLGGAGGDKYAN

SEQ ID NO: 82407 - protein, 94 aa, Zea mays
  Coding DNA Sequence Number=SeqID_40628
MGPQASVSADFGPYKSYPLNRNLVLEICKERLGGGGSGRLREHRYPATIYVGYKLNRLRIGLLFLKVTLGTRLSVKSTFVFRSEKIRVIRVKRK

SEQ ID NO: 82408 - protein, 106 aa, Zea mays
  Coding DNA Sequence Number=SeqID_40629
  Subcellular localization annotation: CTP_CleavageSite=57; ConfidenceScore=5.21e-01
MSSIVRPPSSTCLGVESTVPVSGLFQVTHCSAAPWPCSLRLPAVRISLCARAPASCAANLAVEFPTLCLAPALGFHPSRALLGFSGAGRRSKSLFQPTSLLVAPDG

SEQ ID NO: 82409 - protein, 82 aa, Zea mays
  Coding DNA Sequence Number=SeqID_40630
  Subcellular localization annotation: CTP_CleavageSite=43; ConfidenceScore=5.10e-01
MPLPWNSLLGRALAMLPALASRAHLPLCARACVLRREPRRGVPDALPSPSTWLPSQPRPARLLWCRPPFQVAVPADLITRCS

SEQ ID NO: 82410 - protein, 84 aa, Zea mays
  Coding DNA Sequence Number=SeqID_40631
  Subcellular localization annotation: CTP_CleavageSite=35; ConfidenceScore=5.38e-01
MAALSPLRKQGDVSKDPTAPTAVLPQGSSAPPTATTSHEQGAKTSPTATTARIFGPELKPQREEAQKGYEGWRGAEAVCRRASA

SEQ ID NO: 82411 - protein, 325 aa, Zea mays
  Coding DNA Sequence Number=SeqID_40632
  Gene Ontology: Mol. function=calcium ion binding; Cellular component =membrane; Biological process=homophilic cell adhesion
  Homolog annotation: Hit_ID=Q3DVE9; Match level="QueryCoverage=75%, HitCoverage=75%, E-value=7e-15, Identity=31%"; Hit description =Putative Ig
MSSWLSERFWRPVHVMSWSSEERLSPVEVQLLGLSDLADVSLLPGRARRRPPFEVEVESELRGRARRRPSSEVEAESELRGRARRSPSSEVEAESELRGRARRRPSSEVEAESELRGRARRSPSSEVEAESELRGRARRSPSSEVEAESVPRGRARRSPSSEVEVESEPWGRARRSFLWRLRPVLAAVSLTLTDGTTVGAAQAALFSCQAILALNAPAIRSVGVAIRPRLPLREACPSWASGESKLFADGGYQLRLGVLRLFSYAPASPFRKEEGESAMLPSEGAEHGVSSDLPDPVPFDRVRGLDASLWWDSVTESFLLVSEMS

SEQ ID NO: 82412 - protein, 112 aa, Zea mays
  Coding DNA Sequence Number=SeqID_40633
  Gene Ontology: Mol. function=protein phosphatase type 2C activity
MGGFGQARGPPVAPNPSRPPVGWTEGEQNNPRVVDIDDDHEVPMFDDGQRGAAALDHVQAAAAPEACRTQRRMGHVGLLPEFELAVAKFLLVVGERHQRERLVLVVFVRVSK

SEQ ID NO: 82413 - protein, 280 aa, Zea mays
  Coding DNA Sequence Number=SeqID_40634
  Gene Ontology: Mol. function=DNA binding; Cellular component=nucleus; Biological process=regulation of transcription, DNA-dependent
  Homolog annotation: Hit_ID=Q10FB9; Match level="QueryCoverage=51%, HitCoverage=84%, E-value=1e-32, Identity=50%"; Hit description =Homeobox protein OSH1, putative
  Pfam annotation: Domain name=KNOX1; Domain location=174-218; Score =64.7; E_value=3e-16; Accession=PF03790.4; Description=KNOX1 domain
  Pfam annotation: Domain name=KNOX2; Domain location=224-275; Score =82.7; E_value=1.1e-21; Accession=PF03791.4; Description=KNOX2 domain
  Pfam annotation: Domain name=Lipid_DES; Domain location=1-38; Score =69.5; E_value=1.1e-17; Accession=PF08557.1; Description=Sphingolipid Delta4-desaturase (DES)
  Pfam module annotation: Pfam domain module=KNOX1::KNOX2::Lipid_DES; Domain location=174-218::224-275::1-38
MATDFFWSYTDELHTSRRREILAKYSQIKELFRPDPWGFLKGLSRTTGHARGCKGSPSAVVAPFPTSNSGSPSPDAISARRQRFGNRADLDHQRLGWRGFLHAAQIQAIPRLAHRPPKPAPDAPDADLTGGSKQAATTTPFYLALDHTASATSSPPPAEAPPLPCAANSERGSEIIKAKIMSHPLYPAIFRAFIDCRKVRAPLEIIGRLSALVDDVEMNSDDRQEQRRAADPELDQFMEIYCHMLVRYRQELTRPIEEADEFFRSMEAQIDAFSLLGDYV

SEQ ID NO: 82414 - protein, 164 aa, Zea mays
  Coding DNA Sequence Number=SeqID_40635
  Homolog annotation: Hit_ID=Q6H5U3; Match level="QueryCoverage=27%, HitCoverage=14%, E-value=3e-16, Identity=86%"; Hit description =Putative sphingolipid delta 4 desaturase
  Pfam annotation: Domain name=Lipid_DES; Domain location=121-159; Score=82.6; E_value=1.2e-21; Accession=PF08557.1; Description =Sphingolipid Delta4-desaturase (DES)
  Subcellular localization annotation: CTP_CleavageSite=41; ConfidenceScore=5.12e-01
MARSTTPLTGSALRMLARIAVGTLYPDARHPNPRSPTRFLVAPKRSGSGRGHGGRIRPKILPPPNAVDPVAATAGGSGSRARVRREKEPTNPPTHIRAPAPPRAIGLRPLTTSGMEAEEGVMATDFFWSYTDELHASRRREILAKYPQIKELFRPDPWAFLKVL

SEQ ID NO: 82415 - protein, 628 aa, Zea mays
  Coding DNA Sequence Number=SeqID_40636
  Gene Ontology: Mol. function=hydrolase activity; Cellular component =cellulose and pectin-containing cell wall
  Homolog annotation: Hit_ID=Q10SN5; Match level="QueryCoverage=85%, HitCoverage=96%, E-value=1e-148, Identity=78%"; Hit description =Hydrolase, alpha/beta fold family protein, expressed
  Pfam annotation: Domain name=Abhydrolase_1; Domain location=380-626; Score=39.4; E_value=1.2e-08; Accession=PF00561.10; Description =alphabeta hydrolase fold
MKQRPTRDRPGTAAPPSQKAAELALEPSRARRRHPQATATGYTTPPLGLGVRLHARFLPQAIHPIRSDPSVHHVGDVDAAGWDEEGAAKGGAVTPAPAAAMLGSLAGWLSRTVQPQPPAPRVCGTAGGPPVTAPRLRLRDGRHLAYCESGVPRDQARFAVVFSHGFTGSREDSVRASQVPTDPSTTTTTLSTSPICCWTRTPAFASLARQVHGRTGEIDLERASVGVGVLGTKTTWQRAADGALRRDAVIAASDADWAVGGPSPGSSTKSLGRPGAGVLALAAMELLAKAPVLGCAGKMQRQRQRGSALGRWICRAVAPPRAAPATPPRVRLRDGRHLAYAESGASKEDARFKVVFSHGFTGSRLDTVRPAPEVAEELGVYMVGFDRAGYGQSDPNPNRSVKSAALDVEELADALGLGPKFYVIGISLGCHAVWGALKYIPDRIAGAAMMAPVVNYWWPGFSPELAAEVYAKQEVGDQWALRVSHHAPGILHWWMEQSWLPTSTVVAGTTPLPNERDAEIRSKMKADGTFQQKREQATQQGIHESYYRDMTVMFGKWEFDPMALPEPPCPVHLWQGDEDGLVPVVLQRYLAGKIGWINYHELPGTGHFLSSVPGLGDNVLRTLFSDKQ

SEQ ID NO: 82416 - protein, 156 aa, Zea mays
  Coding DNA Sequence Number=SeqID_40637
  Gene Ontology: Mol. function=hydrolase activity; Cellular component =cellulose and pectin-containing cell wall
  Homolog annotation: Hit_ID=Q10SN5; Match level="QueryCoverage=96%, HitCoverage=49%, E-value=8e-72, Identity=72%"; Hit description =Hydrolase, alpha/beta fold family protein, expressed
MAPVVNYWWPGFSPELAAEVYAKQESWLPTSTVVAGTTPLPNERDAEIRSKMKADGTFQQKREQATQQGIHESYYRDMTVMFGKWEFDPMALPEPPCPVHLWQGDEDGLVPVVLQRYLAGKIGWINYHELPGTGHFLSSVPGLGDNVLRTLFSDKQ

SEQ ID NO: 82417 - protein, 380 aa, Zea mays
  Coding DNA Sequence Number=SeqID_40638
  Subcellular localization annotation: CTP_CleavageSite=51; ConfidenceScore=5.28e-01
MSSCSLMHHVFPPSEPPDGGCPQSFRLVVGGTQLRGSWYLSAIVRLQGFSSCSPAAPLRRRSPKTVTTSPWMGRGKPGCDLGPALSFKDVHHPCWGGEQGEPGLYLPRGPVGHLFFQLLVVATILQLYGGGILQPCWGRRTVAAQLGCNIPPSSSLSWRGRERGPAGALWSGPLFGFDGWFASLEREREREPSGGRVCPGTMAAAAEVAGESPGTRRHAGSPESLGSIGLAVRGFSCLVKGTPRPLFDEPRPGVAVSARAEAELARKEDLVDRSLAGSSVSGTDAGVDLPRPRVGLMSSGDSWPRPRGDQPSRLLGPDSRRRPRRRWPGRDDEVVLQSGDPRTASPSEARSDLAEGVVDAEGAAAPFNRQDPSLRDRIIL

SEQ ID NO: 82418 - protein, 341 aa, Zea mays
  Coding DNA Sequence Number=SeqID_40639
  Homolog annotation: Hit_ID=Q6QP51; Match level="QueryCoverage=18%, HitCoverage=26%, E-value=1e-10, Identity=68%"; Hit description =Putative growth-regulating factor 1
MKILEAERWLKGTNSHGVAFPPTTRRKDCGHPPSGGSEAVAGRVFSNTLQGPPLQRGSWVPHVMQAGPEQKKPNRRAWCMQPPSGYKRPSTFAQTNGRKGGQPCRRHANRAKWAHFSDFQHAQHGGPGPRVMQPVRRMLRASNCTATSATATPPRLRHQYRDSRQHGGIGGASGRRSERCFTFAIMTASKKGPGKGDTPKRTLLREGTRLRAFLLIRGSKAGPSEGFNSRLRARGLHTHYWSEVRRPAPRKGSTAASGHSGSTPTTDQGFVVWPSKGHFRDQRERSCNGIPSEGGIEPSDPVDRGPGLADHPQLIGDTMFGAHRGQHGAFPPSSLRKGDTG

SEQ ID NO: 82419 - protein, 180 aa, Zea mays
  Coding DNA Sequence Number=SeqID_40640
  Homolog annotation: Hit_ID=Q8S484; Match level="QueryCoverage=28%, HitCoverage=16%, E-value=1e-21, Identity=94%"; Hit description =Putative NADP-dependent malic enzyme
  Pfam annotation: Domain name=malic; Domain location=25-120; Score= -44.1; E_value=0.00012; Accession=PF00390.9; Description=Malic enzyme, N-terminal domain
MPSAIFVVVDPADQELNCLFHDFLWRQLRLLRAGSLFRHLVWRLIQRRLLHPRDLTAATENGNGKFLDVLKNWPHRNIQVIFVTDGERILGLGDLGYQEHDELIEEFMAAIKQFYALPQEGAPPCGPGLAGILPQTSVGEEKKEEKVDYLNLLCPVPFEEIQREALSLSPYPSSFNSITS

SEQ ID NO: 82420 - protein, 130 aa, Zea mays
  Coding DNA Sequence Number=SeqID_40641
  Subcellular localization annotation: CTP_CleavageSite=27; ConfidenceScore=5.09e-01
MEGGRCSDGSRTPPPSTPLSPQSPSIVVAHLPSTTLHFLGALCPPTTIKEIQRDDRCEAATRHPSSSHIPCFRFAELSFPILCSLTLVGEEKKEEKVDYLNLLCPMPFEEIQREAPSLSPYPSSFNSITS

SEQ ID NO: 82421 - protein, 93 aa, Zea mays
  Coding DNA Sequence Number=SeqID_40642
MDSENAKLRRALAHLIRVVEERCADIVDVVHGAFQPLALETDWEMEHMAPSPIAESSQTEDELLIDYDSELNNDDIVGYDDGRDYSTDDTYPY

SEQ ID NO: 82422 - protein, 267 aa, Zea mays
  Coding DNA Sequence Number=SeqID_40643
MWRLGDVRYPGESSGSRGGEKSERAVLPSLATSIHLGEGASRRCSSAEPAKLGSKRPCSSGSGGGPLLVVGGKEVAREERKIEGSGATIGVRRRRTAIAKKLRRSTAPTKEGAEKHKRISSPPSSSSSSRSGAPDPKRKRNRPDLGFKTMDSENAKLRRALAHLIRVVEERCADIVDVVHGAFQPVSGPVLNEMNRALVQIEDLANDLDQLALEKDWDMEHMAPSPIAESSQTEDELLIDYDSELNNDGIVGYDDGRDYSTDDTYPY

SEQ ID NO: 82423 - protein, 259 aa, Zea mays
  Coding DNA Sequence Number=SeqID_40644
MNMCELTLAVSHPPQVKDRTFVDNFPACRQLEALPFLDPLKHFRGYKVLMEPVILNRERAATDRLKRVPMLFDDYCDEDFYGLPGKYSIVARVEVKFPIEPHYRDRQHFIFSDINGTKIEAITSWYEIVKHFNNMLHEKHVYKMHNIKFGLHPGEFNFRHLNGPMELYLNQQTIVEPYTVPIQMAPFPKHIFLNLADIVEMPNMTLVECLESSDHTAIHFNLFHHNSHYFGHVINCDIHCSNSKSFGGTAQPSVCCYIY

SEQ ID NO: 82424 - protein, 142 aa, Zea mays
  Coding DNA Sequence Number=SeqID_40645
MELYLNQQTIMEPYTVPIQMAPFPKHIFLNLADIAELPNMILVDIMAIVVHLNTIHRTMWGPFRKIVIMDARWSLHIIKVRGDLLNKNALRWVLAKEDYGIIIGTMFRRFRRQECLESSDHTAIHFNPFHHNTHNFRPNESS

SEQ ID NO: 82425 - protein, 145 aa, Zea mays
  Coding DNA Sequence Number=SeqID_40646
MGGAAARVADFDTDISVADYFVGSDVGQLAVVPPPMAATSPTVVAGAKGAPRDSWATFCVSGEILSAAAAKDMAGSMAQQLRQASQQLSQQLKHAADFADHIPSIFRGPVSAVMGLEQTVTSYCEIVVIVGLISIKIDPTDILGL

SEQ ID NO: 82426 - protein, 340 aa, Zea mays
  Coding DNA Sequence Number=SeqID_40647
MSQRLREASQQLSQQLKQVADFADLVASGALTVDVATEVERLWAQHADAVREKSAAESKNRRLSEKVAAMEAEKMDLLRQLAEERREVNKAIADVHVDKAETSTRAEVERTHVQVVDAYHELGARTADFEVPDQEVGLRFLEWLQEELLVLPTIVIGFMSFASLVTCEGAMNALSREGCRHYEVFDQANENFEREIFKVEDPMVKQSTGALFDRMWGPHGREAVRERSDREIEQMAHAEDVEDLVGLDDVLPEAAEGISMPPSDAALDVAAVEPSPRAESSEELPGASTGYRRQRAVAKQRVSGLARSGEGELRNLFEGEELRIMLFNYREMGIIPKVEP

SEQ ID NO: 82427 - protein, 102 aa, Zea mays
  Coding DNA Sequence Number=SeqID_40648
MGSSSLRAEWESRLVGKVHNLCRVFENRYISRARGGYEIDGFGYDYGAGCQHCNHCSGEDEAVEGDFQEFQDYDERGLAATPSRLPVKAAFIYVSFPHFDLL

SEQ ID NO: 82428 - protein, 134 aa, Zea mays
  Coding DNA Sequence Number=SeqID_40649
MESHDLRAEWESRLVGKVHNLCRVFENWYISRARGGDEIDGFGYGYGAASPLQPNRILAEYVDVYSPLLYTPNRPHPQVVSIATTAQEKMKPWRETSRSSKTTTSSRRGLAATPSRLPVKAAVIYVSFSHFDLL

SEQ ID NO: 82429 - protein, 217 aa, Zea mays
  Coding DNA Sequence Number=SeqID_40650
MWALTHVANRGDFLTLLHVLPSESGHSNRGAAEDASTLANSLGALCKACKPEKPAAKPLVAVAKNGSKTVKQESSSDEDNSEDESDDDSDDEPAKKVAAKPLGAVAKNGLNKGKQETSSDETSSDDESDDDVKPAAPLKKTFVAVAQRKKGDSSESDSDDDSDEEVPPKSKAPAATINKEDSSESESESDSEVECSLCYNALHMLKVTRILFASIRN

SEQ ID NO: 82430 - protein, 179 aa, Zea mays
  Coding DNA Sequence Number=SeqID_40651
EVPPKSKAPAATIKKKDSSESESESDSEVEEALSAAKKESSSEDEDDSSEESSDDEPTKVEEKKDPKVSENIGSEDESSKDESDKDSEEPANTPKKAPKAARGNNISIFIWGFDKNISEDETGGSLGRRVNVAACPSPDGSSARASVKGESEAAEDRRERGGNPVAFVFVPRPGRVRLQ

SEQ ID NO: 82431 - protein, 78 aa, Zea mays
  Coding DNA Sequence Number=SeqID_40652
MVDKVQINTKTVSGVPGWRWSTGRSQELDGGVWLKITGLSGGAPDCPGERLQVVEIPRKRERVKKEEHRGIQVDHWIT

SEQ ID NO: 82432 - protein, 84 aa, Zea mays
  Coding DNA Sequence Number=SeqID_40653
MEKSWLEQPRLCSVWVHRTVRCAWRWSTGRSRELDGSVRLKITGLSGGAPDYPGERLQVVEIPRKRERVKKEEHRGIQVDHWIT

SEQ ID NO: 82433 - protein, 91 aa, Zea mays
  Coding DNA Sequence Number=SeqID_40654
MEGGGAPPPGKVRGEWERLCTDGKTKKRRNLRCNNGGFSPGKKTLAGAEEKSVDCRRFGDLIDEPNALRQSLRRDQRSGTLGFRGRCTDWE

SEQ ID NO: 82434 - protein, 87 aa, Zea mays
  Coding DNA Sequence Number=SeqID_40655
  Subcellular localization annotation: CTP_CleavageSite=75; ConfidenceScore=5.31e-01
ASSQCVRFVDWIPKSPAIDGFGFGSGEGLLPRASPTLPSPSPVAAPLPLRFPSPAAPLSPSPAVAAVADGDARAPASHARAHPSPGS

SEQ ID NO: 82435 - protein, 124 aa, Zea mays
  Coding DNA Sequence Number=SeqID_40656
MSDDLVVPVHFEVGQELCFCLLDHPLLVLLELELLVSRQEISELSLEPAIEGRFDELRYVFPSGVAKKYVDAFSERQILKKNRRRCFSGQARTVRGLGPDGAAEDRRRRLDLAPGRDPVGEERS

SEQ ID NO: 82436 - protein, 118 aa, Zea mays
  Coding DNA Sequence Number=SeqID_40657
MSDDLVVPVHFEVGQELCFRLLDHPLLVLLELELLVSRQEISELSLEPAIEGRFDELRYVFPSGVAKKRGRSAAQGQTVRDLARGGGAIWSGADGAAEIAGGGLDLAPGRDPVGEERS

SEQ ID NO: 82437 - protein, 154 aa, Zea mays
  Coding DNA Sequence Number=SeqID_40658
MVFGTLCRLRIIRCTILGKTHKKRFANKWLQWSARNQIIQVRKRKSLSEMVEPWGGGALRWLLPGLIQIIETSSLRGGLYKSSYMLVKPNLLNYFLTLSKSSQYHRMVDKPLCYLKLHGMSTIQFFDRLILMAYEAHGFLKVFSNSNSIQVNFF

SEQ ID NO: 82438 - protein, 490 aa, Zea mays
  Coding DNA Sequence Number=SeqID_40659
  Subcellular localization annotation: CTP_CleavageSite=57; ConfidenceScore=5.34e-01
MSKTCLASLWPFYAHTVMWRSLDSRWRRMTRTMGPSSPAFGVDLRGPNPAAFAREVEAEAAKIVGRYVPRTETLRSWDIRGSNVRLNRVFELNRLPYAGYMGDDDADAADCRRKKVVTAIDESPSRGAAPAAAAKKRKLGTTAEGLRAFERFAVDLLETHDVPGEMMSSPELWESSARMLKVTEGRWPRNVPIPRAAGEDMFTSRLAREMKIFPYGRNVAVVVPTVMEKDRQDTPQKCRAFARVGDLRREVKMARASAKPAAPGSCKPPPGAPGTSMPLPADYLVSGVAIFDAHIGWGPVGEFNVFLNGVWVFEDPWSRFCASDEIASAAAAKDVAGSVAQQLKHRLQTQHIEAVRDKSATENKSRNLMEKLSTTEAEKEELCRRLAAEKEDADRARAKAQAARAEANLTLNRATDAESVHRRLHGYLDKAEASTRTGEELELLPSIVMGLMSFASLITYEGAVNALSREGCRHFEVFDRANEDFDRGIF

SEQ ID NO: 82439 - protein, 315 aa, Zea mays
  Coding DNA Sequence Number=SeqID_40660
  Subcellular localization annotation: CTP_CleavageSite=42; ConfidenceScore=5.04e-01
TLALANYSPALLALPLRKSGPHQADRAPPLTSGHTVEFGTLRISSVRVLEMQRLGYFGDGIGWVPGAEEILEPEGELVVFEAFLSPAFVSRRIASWQRQPSMEVFAKNYCLHWQKRKIGNKIAQFGSCTFTPRTGKTSAEVMEVVPCAWNKWGNWCDFWFYVSPNEVEDLPGLPPAILCSHCYVAFPRFEVVEDDEDEEAFRYAARLSSRRDLVEEFIGYGVWPLAHGWVLGVVYPHRMPTLGDRLVQSPAFGVDLRGRNPAAFVRKVEAEAAKIVGRYVPRTETLRSWDIRETCVVPGENDVFARAPRIFPHEC

SEQ ID NO: 82440 - protein, 222 aa, Zea mays
  Coding DNA Sequence Number=SeqID_40661
MDVESWGRWLGPRRDDLTINWAFGSFVRSFILPVDPGYICPPQRPLTVPLVPPRLPPLLRPPHPQRRESAPQAPRLRSPIWKHRFSRSTIGSSPVTHEFAIGDRRPLPTLGCRHLDGHGTLHLLLAELAVARHLGVVRAPNSPTIASVVRCGGGAFHGGALHFLADHAVSRDLIIACGSGEDTEATAPVEEASGVHVAATEKEWKVSLGSESFRPLRRSAPQ

SEQ ID NO: 82441 - protein, 396 aa, Zea mays
  Coding DNA Sequence Number=SeqID_40662
  Homolog annotation: Hit_ID=Q4ACU9; Match level="QueryCoverage=14%, HitCoverage=50%, E-value=4e-07, Identity=46%"; Hit description =Thioredoxin h
MEASTVAWFCHRALRPRFPFPRPQSPPPLWGTDIPRVHWKDKRPHERPEGPINRKVIPSWAWGGMTSEADRHKAESIQIRCARKSAADGRSAPLRQIGHARNARKSSPQQCATTSSSDARMEAPRPCAKSAAPSISLARKSSPQQCAATSNSDARMEGPRPCAKSVAPANPLQRLQIRRQWKVVAHFRASWCVMSLSMNYKFEELVQTHPEVLFLYVDVDDVQNYLTGLVPSFIGKYPMQYIFECIHKFTGIQLDVAIVIALALTNSYSSATTQLKGRRSCSYYLLSAFLSFTVLFIRVRLWVRVMSNAIVGSIIKHDIIAYLGTPTIHCYLLPIGQGTYSNVYRASDLEKKIVALKKVHFDSLELESGRSNRVQRHVFDRAVAQHDERWGVPLLV

SEQ ID NO: 82442 - protein, 168 aa, Zea mays
  Coding DNA Sequence Number=SeqID_40663
  Subcellular localization annotation: CTP_CleavageSite=45; ConfidenceScore=5.33e-01
MARASAKTAAPGVSMPSPIALGPSAPLPALPTQERRHASPTHAAEAAVGGAEVSLDISVGDYTMGGVAIFDAHTGRGPARAESGQLAVVPASAVASAVAVGVEGPTLDPWARFYASGEIASAATKDLAGSVVQQLKHVTAFAERNASGALTSEFAAERWRLEGRIERL

SEQ ID NO: 82443 - protein, 407 aa, Zea mays
  Coding DNA Sequence Number=SeqID_40664
MEKDRQVTSRKRRAFARVGDPWREVKMARASAKTAAPGVSMPSPIALGPSAPLPALPTQERRHASPTHAAEAAVGGAEVSLDISVGDYTMGGVAIFDAHTGRGPARAESGQLAVVPASAVASAVAVGVEGPTLDPWARFYASGEIASAATKDLAGSVVQQLKHVTAFAERNASGALTSEFAAERHFEVFDRSNEDFDRGIFQVEDEVLKRSTGALYDRMWGPHGRDTVRERSNRALEQMANDEEVDDFGGLESSVTRAEDVPTSGPAQATPTDDTNFVAVANAVPTNDSLSGSESGSWSSDGGEFGSPFSWTEESSHEDLDYFAALDVAAAESSPRLDVREALDPPAGVRTDRRRRKVVSRHSVGEMSRSGRHRRMGMERTRLRVDRGGPRDLMSLSLGRALGTNSS

SEQ ID NO: 82444 - protein, 58 aa, Zea mays
  Coding DNA Sequence Number=SeqID_40665
MGAESSRLVLGACTWGFSAGEGGMGVMAGRKILRAAVRRRAPCPSVREGAGRRMAWGE

SEQ ID NO: 82445 - protein, 353 aa, Zea mays
  Coding DNA Sequence Number=SeqID_40666
  Subcellular localization annotation: CTP_CleavageSite=61; ConfidenceScore=5.59e-01
MAASAGRHGKAGGMGAMAGRKLLRATVRKTGTGSSQGGAATGRGARLASSLEEGARRKGRLAAMGGPCAPACCCREEERRLLLRENNVDAESNTERRGLTGVNDDDDGLSPNTNATAWVGTAQIGSMQATPTGSHGCCSLRHFDEHAEGATQREPMWLRELPSRLLREVDGALLAWARGGTEMGAESSRLALGACTWGFSAGEGAGVLPRSSAMAASAGRHGKAGGMGAMAGRKLLRAAVRKTGTGSSQGGAVTGRGARLVSSLEEGAHRKGRLAAMGGPCAPACCCREEERRLLLRGNLQAVAVEWDEYRRQVTEASLCVDSLSNHLEVERSEGRALRAQMGELEMDLETTA

SEQ ID NO: 82446 - protein, 157 aa, Zea mays
  Coding DNA Sequence Number=SeqID_40667
  Gene Ontology: Mol. function=ubiquitin-protein ligase activity; Cellular component=intracellular; Biological process=protein modification process
  Homolog annotation: Hit_ID=Q2L3D3; Match level="QueryCoverage=52%, HitCoverage=9%, E-value=6e-07, Identity=42%"; Hit description =Polyubiquitin-like protein
MENHPGKQCYHKGGMGHPWPTGFLELVELWKGLVVLPCLVSSVEKNGKSRSLGRWHPHGWQLASHVASTTAITESEPSKMPSAAFSLNKLVKEFIHRANLWLSRHDRAATVADRAAADHTVVYLEIFLQAGAAFVLVRWGVAGQRTAVCVGAVVLRA

SEQ ID NO: 82447 - protein, 111 aa, Zea mays
  Coding DNA Sequence Number=SeqID_40668
  Gene Ontology: Mol. function=protein serine/threonine kinase activity; Cellular component=membrane; Biological process=protein amino acid phosphorylation
  Homolog annotation: Hit_ID=O49974; Match level="QueryCoverage=89%, HitCoverage=11%, E-value=1e-43, Identity=87%"; Hit description=KI domain interacting kinase 1
MPSKSLDAFLFNPEKQRLLVWKKQFDIIEAIARGLLYLHRDSRLRVVHRDLKASNILLDADMKPKISDFGMARMFGGDQNQFNTNRVVGTLYAQTQWAIQEPHYCNLVMIH

SEQ ID NO: 82448 - protein, 727 aa, Zea mays
  Coding DNA Sequence Number=SeqID_40669
  Homolog annotation: Hit_ID=P93404; Match level="QueryCoverage=17%, HitCoverage=51%, E-value=3e-63, Identity=92%"; Hit description=L -ascorbate peroxidase 1, cytosolic
  Pfam annotation: Domain name=BRF1; Domain location=350-452; Score =85.3; E_value=1.9e-22; Accession=PF07741.3; Description=Brf1-like TBP-binding domain
  Pfam annotation: Domain name=Pkinase; Domain location=550-724; Score=- 79.1; E_value=0.00075; Accession=PF00069.15; Description=Protein kinase domain
  Pfam annotation: Domain name=Pkinase_Tyr; Domain location=573-724; Score=-131.5; E_value=0.00021; Accession=PF07714.7; Description =Protein tyrosine kinase
  Pfam annotation: Domain name=peroxidase; Domain location=375-560; Score=39.2; E_value=2.1e-11; Accession=PF00141.13; Description =Peroxidase
  Pfam module annotation: Pfam domain module=BRF1::Pkinase::Pkinase _Tyr::peroxidase; Domain location=350-452::550-724::573-724::375-560
MAPAQHGTRGRSSIRRPSLRQAHADANYRPSTETFLRLRLRRHLPELRPGRPPARQLDWTSSSPRAPSSQAPLAEAQTCLQAEVPSSAPPRGKQVMDQCKLYPWSCFQMPCAVFSNSETNSQYFVLGVDCDDYGFIDLEVWRDRAHRTFYLGVGVAFPKPTLLPSPSGSYVLGAVFLQLCQVLQLAEHPVVQKLVDPSLFIHRFTKPDESNEEPVSKHSPKSGEIICKHKDKGFEHFAHGLCEKCYNKFTKLSGGLEGGSVPPAFQRAEKKRLEAAKRAEEAAAAKEAALEESLCDTQNSEVESAMTPRKGLSGDKSSKMGSEGLINDSMPPKDPEEGGENCEGNADPESLSDIDDAEVDGYLHNEEETQYKKIIWEEMNKEYLEEQADKEALAAELAARGIDPEAGKKKRKRNEGTKSSTPAETPAEATCNMLKRKGLGSKINVGAVDELYKDKPQPPPEGRLPDATKGSDHLRQVFGKQMGLSDQDIVALSGGHTLGRCHKERSGFEGAWTTNPLVFDNSYFKELLSGDKEGLLQLPSDKALLSDPVFRPLVEKYAADEKAFFDDYKEAHLKLSELGAMLDISQSIRFDDDVEDGKSHELKVEEKIQVYEYMPSKSLDAFLFSIARGLLYLHRDSRLRVVHRDLKASNILLDADMKPKISDFGMARMFGGDQNQFNTNQVVGIFGYMSTEYAMEGIFSVKSDVYGFGVLILSFHCHEDSLNIAGY

SEQ ID NO: 82449 - protein, 269 aa, Zea mays
  Coding DNA Sequence Number=SeqID_40670
  Homolog annotation: Hit_ID=O49974; Match level="QueryCoverage=14%, HitCoverage=4%, E-value=2e-14, Identity=100%"; Hit description=KI domain interacting kinase 1
  Subcellular localization annotation: CTP_CleavageSite=77; ConfidenceScore=5.82e-01
MALGSNVLGCKTYVRSTTPARTTSLIVVWFGTSSGSTRRSSPSSYVLRRRTRCMGTSALGGLNDVALMRTHEHPLLRASMGSVYLIGQTSLPITFSTIENFRMEYIDFDIAQALPPLQRHPWVHPCSTNSWFRQIHMVREDDEKTTFITLSKLKLYCYVSMPYGLKNMLPIYIIVVHYTLKNTSMKKGASASGMNNICNRYLQAQQHVPLSLIILVTTSVYISSDVQGVLVTMEAYSPLSCDDLQDQDSEAVDVRLDGENTSIVYSVDM

SEQ ID NO: 82450 - protein, 300 aa, Zea mays
  Coding DNA Sequence Number=SeqID_40671
  Gene Ontology: Mol. function=NEDD8 activating enzyme activity; Cellular component=signalosome complex; Biological process=red or far red light signaling pathway
  Homolog annotation: Hit_ID=Q69VK6; Match level="QueryCoverage=87%, HitCoverage=100%, E-value=7e-96, Identity=73%"; Hit description =Putative COP9 complex subunit, FUS5
  Pfam annotation: Domain name=PCI; Domain location=63-176; Score=46.5; E_value=9.2e-11; Accession=PF01399.17; Description=PCI domain
MAMDAERRQAELIAQFSSQAVALSSAQQLAALVLEATSHPALFAFSELLALPALSMLAGTQYSSSLDLLRLFAYGTLKDYKSKIVACAFAILTLLPFADNSGSLPALLPDQVRKLKQLSVLTLAESTKILPYDQLMQELDVSNVRELEDFLINECMYSGIVRGKLDQLRRCFEVQFAAGRDLTPDQLNNMIEILSDWLGTSDSLLHQIQEKIKWADTMSDVNKKHQKEFEDRVEEAKKSIKADIDIRGHDDYLSESVGIMDFEEDRVRPKSLFWLSRYTTFYYESNLDLGAYQRRRQPLA

SEQ ID NO: 82451 - protein, 68 aa, Zea mays
  Coding DNA Sequence Number=SeqID_40672
MAEVEQFKQADIDIRGHDDYLSESVGIMDFEEDRVRPKSLFWLSRYTTFYYESNLDLGAYQRRRQPLA

SEQ ID NO: 82452 - protein, 243 aa, Zea mays
  Coding DNA Sequence Number=SeqID_40673
  Homolog annotation: Hit_ID=Q6QP51; Match level="QueryCoverage=17%, HitCoverage=19%, E-value=2e-11, Identity=78%"; Hit description =Putative growth-regulating factor 1
  Subcellular localization annotation: CTP_CleavageSite=15; ConfidenceScore=5.57e-01
MQAGPEQKKPNRRVRCVQSPSGYKRLSTFAQTSGRKGGQPCRRHATVPSGRTSPTPNTPSMEAQAHASCHRRAECFVHATAPPLAPPPRLLDCGTNTATRGDPAHDPTAPAWRDGQCGQKWAGSNGGGRRARAAVTSSAKLTSHPGTGPRKGDTPKRILPREGTRLRASLLIRGSKAGPSEGFNSRLRARGLHTHYWSEVRRPAPRKGSTAASGYSGSAPTTDQGFEGWPPKGSQPPQTQSEG

SEQ ID NO: 82453 - protein, 331 aa, Zea mays
  Coding DNA Sequence Number=SeqID_40674
MAARPFARWSGQKWRAAWRVAFKRRVTLLEGDRVFALPYASCLSIFQAPGWGYPPAFRFVVGGTQLCGSWYLSAVVRPQGFSSCSPVAPLRRRSPKMVTSSSMAGESEPGRDLGPTLSFKDVHHPRWGGGRVEPELYLPRGFVGRPLLRRSRERALTGPAGGSDFDNTGLIDGGRRQPQRVGLVGLAPGAPSCRKAAAAPCAREDRPRYRVLSGQRSCSGAVLPLHRYGASTRSSIRPEALAAAVRPPGAGVVVAAAGTGNDSPVGCLNCFTKRESPRVKVTSEESLGSVSLVVRGFPGLVRGNPRPLFDEPRPGVAVPAQTEAELARKED

SEQ ID NO: 82454 - protein, 197 aa, Zea mays
  Coding DNA Sequence Number=SeqID_40675
MTLDYKCTFSLKGDESTSVTQKQKPNQREQYGDTVHLFIDTGHSPYKITFMPFTFGSNSIVIHRGLNSLFIFKSVSFSASVPKLSCSHLRRCINLRIILGFSYCDSDSSPKMVNTRKGGGIDLPANPFNRRVLRQQQQADMNPLNPSPAEADLVVAAQMQMMQQMVDTMADMHAQMRQERQEMRQEREEMRQERRVQ

SEQ ID NO: 82455 - protein, 167 aa, Zea mays
  Coding DNA Sequence Number=SeqID_40676
MTLDYKCTFSLKGDESTSVTQKQMPSPREQYGDTVHLFIDTGHSPYKITFMSFTFGSNSIVIHRGLNSLFIFKSVSFSASVPKLSCSHLRRCINLRIILGFSYCDSDSSPKDLRKPKAPNKNLIMDMHYEACIQAIITYYGSVLGGRRWARKDVWTMSLAPQTSTYT

SEQ ID NO: 82456 - protein, 111 aa, Zea mays
  Coding DNA Sequence Number=SeqID_40677
  Subcellular localization annotation: CTP_CleavageSite=76; ConfidenceScore=5.18e-01
MRDLEGVPCNTPGVTQANFSPLYLPTPTISRLGTHSEKIGFGAEKRPSRRRPPPPVLVARVAPTTSDTDPHTDVTVATSRTSLTTPPELYCRWGLCAMSVTQANSGPRVVL

SEQ ID NO: 82457 - protein, 254 aa, Zea mays
  Coding DNA Sequence Number=SeqID_40678
  Subcellular localization annotation: CTP_CleavageSite=28; ConfidenceScore=5.20e-01
MNRSCRLRRRRRGSSSTLGVNSTFGEVRPSLGRQHGRRVSTPKDDVSTTPGPSSPGSPPESGPSIRLDRSTPSLSQLSSEDTSPARSLGNSTPASVPPVDGPTRLRPTKSSSRANSASVHTDTAASGSGSSKSGRGFYLKSRGEIPLRGEGCNTPGVTQANFSPLYLPTPTISRLGTHSEKIGFGAEKRPSRRRPPPPVLVARVAPTTSDTDPHTDVTVATSRTSLTTPPELYCRRGLCAMSVTQANSGPRAVL

SEQ ID NO: 82458 - protein, 114 aa, Zea mays
  Coding DNA Sequence Number=SeqID_40679
  Subcellular localization annotation: CTP_CleavageSite=48; ConfidenceScore=5.06e-01
MGKVAVFINKGFSQQSSQSVPNFTLKGGSSGADDARKILNNDGTCPICDQVLSKRNMVAPKDNRRIAVAAFISGEWKGVQDQANAVFFNFDEKGGLRDVWIRLRFPNFGEKFRI

SEQ ID NO: 82459 - protein, 376 aa, Zea mays
  Coding DNA Sequence Number=SeqID_40680
  Homolog annotation: Hit_ID=Q2RAK3; Match level="QueryCoverage=30%, HitCoverage=18%, E-value=5e-36, Identity=65%"; Hit description =Expressed protein
MSGYGSCSGDRCDLDLRGGSGRGGRYEEYKSEYITTQKKAYFDLHKDEDWLRNKYHPTNLGNVIERWPMLFLFDENLLRKVFELYYENGLLDLSYAPDVGDYLVCEEEHCRTWFFIRRGSTILISPSNSSVENSCMKIDLDYCEYDLKKNRDYIWTVNSESLCTDIISDKSAMLAGLIWKGKLYRPPVVIFYVWFHSTALSGADDARKILNNDGTCPICDQVLSKSHMKPMDINPGDDWTNATEDTDIAVELYRLSVSTLDLLKLASKEEQGAYVGAWYNMLLSCAQELKHGVALWQEFYHANVCDRVVSEGGHYLIALGEIYRVAQILYLSLQRFKTWVLADLGMLSKMLSCLDNCTYIRKPNKNRADSRAVLGR

SEQ ID NO: 82460 - protein, 127 aa, Zea mays
  Coding DNA Sequence Number=SeqID_40681
  Homolog annotation: Hit_ID=Q6EUG3; Match level="QueryCoverage=29%, HitCoverage=12%, E-value=4e-12, Identity=76%"; Hit description =Putative bZIP protein
MGKVAVFINKGFSQQSSQSVPNFTLKGGSSGADDARKILNNDGTCPICDQVLSKSHMKPMDINPGDDWTNDFPVVVFPAPIGYCIRGTWLLLKTAEELQLQHSSVGSGKEFRTKPMPSSSILMKKGD

SEQ ID NO: 82461 - protein, 160 aa, Zea mays
  Coding DNA Sequence Number=SeqID_40682
  Gene Ontology: Mol. function=drug transporter activity; Cellular component=membrane; Biological process=multidrug transport
  Homolog annotation: Hit_ID=Q8H3W4; Match level="QueryCoverage=67%, HitCoverage=19%, E-value=3e-25, Identity=58%"; Hit description =Putative ripening regulated protein DDTFR18
MAGPLIVLGQVDPVLRDGADDARKILNNDGTCPICDQVLSKSHMKPMDINPGLMPDSQLSTSIIAMCQNTEAISYMITYGFAVVITTRVSNELGAWNIANDRKALTVSLALSLMLGVAFLLLLGLGHDLWVRLFTISEAVVSAFASMTSLLIGSVVLDST

SEQ ID NO: 82462 - protein, 69 aa, Zea mays
  Coding DNA Sequence Number=SeqID_40683
MGFAPILAVTEPPKSLGPPTVVLVHQTSDNPAGTTLEQKQQKFAASSPTTTWAQGYAGFWESSFTCQVK

SEQ ID NO: 82463 - protein, 207 aa, Zea mays
  Coding DNA Sequence Number=SeqID_40684
  Subcellular localization annotation: CTP_CleavageSite=43; ConfidenceScore=5.03e-01
SSRSQRHPQQAIGKKVLALALGQQDPTAVDKLLSTQHPQFLARKGSRAAGPLPLLPPFQLSLVLAGLTIELVSTPPFQLQLAARPAPCCREFQPEFRLVAQLLTRHGPGRRIAVRSVAWWVLVAGMVGRREIWARRRFIMPNVVPFVPVVDFLFATASSSSRPYQPSNSAFASVPHALIFASWSYTSLRYSESANHHCSSAPKHSSP

SEQ ID NO: 82464 - protein, 64 aa, Zea mays
  Coding DNA Sequence Number=SeqID_40685
SSRSQRHPQQAIGKKVLALALGQQDPTAVDKLLSTQHPQFLARKGSVLQAIAPAPSVPTLPCAR

SEQ ID NO: 82465 - protein, 366 aa, Zea mays
  Coding DNA Sequence Number=SeqID_40686
  Gene Ontology: Mol. function=DNA binding; Biological process =regulation of transcription
  Homolog annotation: Hit_ID=Q8RV35; Match level="QueryCoverage=55%, HitCoverage=69%, E-value=9e-17, Identity=32%"; Hit description =Putative OsNAC protein
MAANDHVFRATNEASVALLRDLRAGTVDPRFKAFIHHADVYTAVPEELVADLEPVPGTDVTEDGYNRQWYIYCPKRYKNGEGRTSGHRLRAVETAGTCWHSETGPKPMEGLPGATFCSLSYGHKEKEGTSGRHRFHRMGWRMFEYDDTQGGGGDHVLCKVHRSSSSLAKNKSKAKRTATGDHPEAPPTKVIHDVQDPAGAIFTGAYPTMDDPLMVGGEEASEADLGKFNVGDLLINIDNVDWKALLDYVDGEHQQQQPCAEPAKQSSDVQVHVDPAATFMSSNVHGHEQGGDSMMVGGEEEQRRLIEEGFNVDDLFDVNNVDWKALLEMLEDDEEQGLPLQQQPRAEPAVEQSQSSRIEDPSVPPV

SEQ ID NO: 82466 - protein, 125 aa, Zea mays
  Coding DNA Sequence Number=SeqID_40687
MGFGPVSECQHVPAVSTARSLCPLVLPSPFLYRFGQDKYHCLLYPSSVTSVPGTGSQVGDLLLRDSGVNVRVVDEGFESRVDGSGAEVTQEGDGRLVGGPEDVIVGGHMPPISDLQVVMVYRPAG

SEQ ID NO: 82467 - protein, 71 aa, Zea mays
  Coding DNA Sequence Number=SeqID_40688
MVAGDDKVSGATTTTTAPPLGHKGNPVEVDNEDLLTWSPARKKMRAAGAGAESSEAASTEAVKVFIMFHNT

SEQ ID NO: 82468 - protein, 897 aa, Zea mays
  Coding DNA Sequence Number=SeqID_40689
  Gene Ontology: Mol. function=transferase activity, transferring glycosyl groups; Cellular component=membrane; Biological process =cell wall biogenesis
  Homolog annotation: Hit_ID=Q6YUI8; Match level="QueryCoverage=58%, HitCoverage=92%, E-value=0.0, Identity=67%"; Hit description =Putative xyloglucan fucosyltransferase
  Pfam annotation: Domain name=NAM; Domain location=16-148; Score= -41.0; E_value=0.0011; Accession=PF02365.6; Description=No apical meristem (NAM) protein
  Pfam annotation: Domain name=XG_FTase; Domain location=386-871; Score= 527.7; E_value=1.3e-155; Accession=PF03254.4; Description=Xyloglucan fucosyltransferase
  Pfam module annotation: Pfam domain module=NAM::XG_FTase; Domain location=16-148::386-871
MSRSDSPSPSPAAARRAQPSDATLVNAFLWPWVTLGITMPGGVHAVDLYSADPEKLARGYQPEVSLDGQCTWYFLSPLRPKSPHDPRKVRTVADGTGCWRSDSGVKNVIDCLDGARHVGYRQNFSFMRRDAAGADARSGWAMTEFHLHHSYDEHGHGGKVEGLVLCKMYRNRNRRIHGGSDDVVPGVSPCAEKTFSCGKSQPIGHDYSKAKNSDGGATATGTIAPPLLNSMVAGDDKVSGATTTTTAPPLGHKGNPVEMDNEDLLTWAPARKKMRAAGAGAESSEAASTVSNPTPDQAPSPVWLGDAAWVRRLHAVGEGTPDLGYRQAGAEVAEMEMASAAGGVPKKLDDDPAAHAAEPWPPAAREEKNKLWRRVLLVGSLVTLPLVAFFVLGRESASTAWLQMAIAKLTAMNNGTAEGPHVHGRDELLGGLLAPGMDRRACRSRYQSWQYYKHFPFAPSPHLLAKLRAYEARHRRCAPGTPLYAKSVEQLRSGRSADDMECAYIVWLPFDGLGNRMLSMVSGFLYALLTDRVLLAAVPPDSADLFCEPFPGATWRLPAEDFPVANLFGVGQDIDRSYTRLVGDGKVGPGLAAANATPSYVYLSLGWQLKDPLFFCGEHQRALGKINWLLLYSDLYFTPSMYAVAEFQDELRRLFPERESVHHLLSRYLLHPANPVWSLVTRYYRSYLPAATRRIGVQIRMFGHSSIPADDMYNQILNCSRQEHILPETEDGDEDAIDRNGGDGSNNSTAILVVSLYADHFERLRSRYYEHAAKGGEMVGVFQPTHGERQATDNLAHNQRALSEIYLLSFSEELITSGLSTFGYVSSGLAGVRPAILLTAFDHKVPETPCRRVVSMEPCNLTPPRGLECTDKPADVEDLARHVRVCEDFNDGVKFFD

SEQ ID NO: 82469 - protein, 94 aa, Zea mays
  Coding DNA Sequence Number=SeqID_40690
MGRPETTLVRTPPVEQQSLVPHKAKPGIPGKAKHITQVGLSFLPPTLEQPWNRNNRTQQFHHLQQHGFENPEYGVYFHKSYPSKEKDSQGYASL

SEQ ID NO: 82470 - protein, 102 aa, Zea mays
  Coding DNA Sequence Number=SeqID_40691
MGLKTLSTECTFASLTRQRKKTLKDILAFGIQDQNGFTPTESIDTPPSSLLPRRVHATLATSPLPLHGGLSGIGSTEAKLTHDEAYGQLKGPRSAGLHRLGP

SEQ ID NO: 82471 - protein, 1084 aa, Zea mays
  Coding DNA Sequence Number=SeqID_40692
  Homolog annotation: Hit_ID=Q4YXS7; Match level="QueryCoverage=24%, HitCoverage=92%, E-value=7e-14, Identity=26%"; Hit description =Erythrocyte membrane protein 3, putative
MPDSADPLPTQASPDPDMPPRKPTAGCGGGKLKKPLTDKQRAAAEQRLSHLRAHLILRSLESSAAGARALPPAQEAALDALGLLEFFRLDLQSDTLRPDLIAPLVAYYDPVCKRSFVRGVRVAVSRHNFTRALCLPSKPSPSAPAPADIDPAAVVPAVMQLLKDYVLLPFLGDDMCILPQEVAAAEQAVREGAAHRVDWAGLMWGLVEKEILELPKREDGVCYYGPHLQRLIYAQKPHLLELVEEGGTGEPAPEASTDVEMEEDGDVDMKSKSLVELELGDRDGDASNDVRSKSLEESELGNASARSDGLDELELGVSVTRNKVMEELGLGDMDDRNNSIEELEVVEEDARSKRLDEYESVDVDPDAMDNNIDEINTVNEDSRRKSLNESETVDVDPDAMDNNIDEMQAVNEDSRSKSLNESEDVDVDPHAMDNNIDEMEMVNEDARTKSLDESEAVDVDPDAMDNNIDEMEAVSEDSRSKTFNESESVDAMNNNIVELDAVNEDTRSQRLNDESELVEEDVKGPNLDDKNTADEHVNGTNIDGICLGFVAVEVVPAVHEARLDNNEETAEVAPMGGDDVPVPTDVDGEEPLVEAAAVTQEVVAVAEELGDDEAEEDEEKDAMGLSLGFDSTNGYVAMDVEEETNVENLDEDESDSANEEAEESEDDAFEVNDGEDMNWRIGDGRGDEGMSHSLQRCNTFGGMEFENLNEGETVMKDELRFDDFPARASSERMTPSNLLQAMNSIPSTYNVAGNVHDLPSGDFLAMGADAHKNGVDLGPGSSYLFGNNGKRNIDDIDGYDDNMQAQEDFPQSNQQKRMRHSNSGNISPGSGFFNASFSVPIQNLMVEASRLYEQKEQKLQSLQFEKQHWSDMLQEKEAIIQSLNSARFEQQNKYQVELRRFEHDLNVMAHLVTTYKRALKQTRASFDEYRKKFPCNVPLYDDVAGGGGLVLSVRELEKRRCEEEQQKIAMLPPPHPSLSLDHELVSNLYHHPHVFHCCYLRTSPIAVRGFLVRRAVRKLHLLISSSLHQLAACTPNHQVSSILFEPPAEVEIWLEDELVLKGGGDVMGIIGSERQQPGGDKARE

SEQ ID NO: 82472 - protein, 208 aa, Zea mays
  Coding DNA Sequence Number=SeqID_40693
  Pfam annotation: Domain name=IQ; Domain location=92-112; Score=23.7; E_value=0.00065; Accession=PF00612.17; Description=IQ calmodulin -binding motif
  Subcellular localization annotation: CTP_CleavageSite=27; ConfidenceScore=5.36e-01
MTPGISSRLSSPPPAAHPSPPPAAAPSAAATPSHPSSPTPDAFTRLEESFGHFAEKWDQFVVMFHRYKEKTEKELQVAVRLQTTARGFLARRQAMVRLQATVRGFLVRRAVRKLHLLISSSLHQLAACAPNHQVSSILFEPPAEVEIWLEDELVLKGGGDVMGIIGSSHSCGAAPMRAKSERPQGRWQQRAQEGMAKESARKEGMAKE

SEQ ID NO: 82473 - protein, 77 aa, Zea mays
  Coding DNA Sequence Number=SeqID_40694
NDACPPACESVLPLFPAEARIRGMTRPLFDEIVKTLCGEARSKDCLKLWLFANSLTKSAFPCREAVSFELAWSIGQI

SEQ ID NO: 82474 - protein, 146 aa, Zea mays
  Coding DNA Sequence Number=SeqID_40695
MDGASGSGFGGVWLVDGSDAAFSSDSDKLRYFCQLSEADPEADPEEFIQFMRADSLPKKTPKRERITKARLPGQPIFLKKEERNDACPPACESVLPLFPAEARIRGMTRPLFDEIVKTLAHPVSTGSLPGDTPHPHLSEDYKAFSN

SEQ ID NO: 82475 - protein, 119 aa, Zea mays
  Coding DNA Sequence Number=SeqID_40696
MDGASGSGFGGVWLVDGSDAAFSSDSDKLRYFCQLSEADPEADPEEFIQFMRADSLPKKTPKRERITKARLPGQPIFLKKEERNDACPPACESVLPLFPAEARIRGMTRPLFDEIVKTL

SEQ ID NO: 82476 - protein, 149 aa, Zea mays
  Coding DNA Sequence Number=SeqID_40697
MDGASGSGFGGVWLVDGSDAAFSSDSDKLRYFCQLSEADPEADPEEFIQFMRADSLPKKTPKRERITKARLPGQPIFLKKEERNDACPPACESVLPLFPAEARIRGMTRPLFDEIVKTLSRGSDNLVYCKAGDVSLCVLHSILLMLLIS

SEQ ID NO: 82477 - protein, 191 aa, Zea mays
  Coding DNA Sequence Number=SeqID_40698
  Homolog annotation: Hit_ID=Q6QP51; Match level="QueryCoverage=27%, HitCoverage=30%, E-value=1e-11, Identity=65%"; Hit description =Putative growth-regulating factor 1
  Subcellular localization annotation: CTP_CleavageSite=60; ConfidenceScore=5.44e-01
MVAFQGGHPPFKGNSPHLRPQPSRAESSPTRSKVLPLRHEGWVPRVAQAGPRQKEPKPPRAVPVTARRLRAFFHFRPDQRVKGRTAMQAACNRTKGAHPFDFDASSMEAQAHTSCNRDRERGYLERDPSPRRKRAPSPPTDQRFKGWPLGRVQQPPQSTRAPRPLLIRDWKVGPSKGFNGRLRPLGLRANY

SEQ ID NO: 82478 - protein, 377 aa, Zea mays
  Coding DNA Sequence Number=SeqID_40699
  Homolog annotation: Hit_ID=Q6QP51; Match level="QueryCoverage=54%, HitCoverage=95%, E-value=6e-16, Identity=41%"; Hit description =Putative growth-regulating factor 1
MQVACNCTKGTHPFDFDASSMRPRPTRHQGRRHLWQAKRATLHLRHDDRIKKGTGKGDTLKGILLREGRGPRALLLIRGSKAGPSEGIDSRLRALGLRAHYWSEVRRLAPRKGSTAASGHSGSAPTTDQGFAGWPPKGFDTRLRAHRARDDSGYVRYMAEARATLPRSIQCKDRLTPYPDARSSVDKAEENSAACAAPTVVPPARVRQTAANSSLGRHRKLRLARPKGSDSTSTPEDGLRLARPQGSDSTSTSENGLRLARPQGSDSTSTSEDGLRLARPQGSGSTSTTEDDLRLARPQGSNSASPNPRARAQPRPRKTISASPDPRTRTQPRPRTTVSASPDPRARTQPRPRRNHRLARPWAQTDHATGGPSLPYP

SEQ ID NO: 82479 - protein, 592 aa, Zea mays
  Coding DNA Sequence Number=SeqID_40700
MGARAAASGAGKLPSAEPAKERRPLSSARTDVAVAHVANFDMDICVGDYLVVGCCPDSGGGPFANGGGWGEGCFADPWSNFCASGEILSVVAAKDVAGSMSQQLRHASQQLKHIERLRAQHTDTVREKSATENKSHKLTERLAAAEAEKGDLRRQLAEESRDANKAIVDAQAAQAEVKLARAEASLARQRVEELEVRINRLRNRVDKTEVSTSAEVERTHAQFVDAYRELGARTAAFEAPGQEAGLCFLERLQEELGVLPTIVTGLMSFASLVTYEGVVNALSREGCGHFEVFNLLNEGFKREIFQVEDPVLKRSAGVLFDRMWGPHGRETVRERSDRAIDQMAHDEEVEDLGEQDSTLPEASRVELAPPSDAGKGPSATPAPTGAGEDPALAPALTGEEASKAVGEPVAEDPAAVAGPSQVPTFGPAQATAADNTDFVAASTVVPADDSLFGSVSGCFESDGESGSSFPWTEESSDEGLDYFIALDVATAETSPRVEGVGDLPSASTGYRQRRVAGKHSVGGFSRSGRHRRMGMERGRLRVDQVGKQELLSSPIGASIGEGDLRNLFEGEELRIMLFNYREMRIIPKVELM

SEQ ID NO: 82480 - protein, 768 aa, Zea mays
  Coding DNA Sequence Number=SeqID_40701
  Homolog annotation: Hit_ID=Q8H3R5; Match level="QueryCoverage=28%, HitCoverage=58%, E-value=4e-85, Identity=71%"; Hit description =Putative indole-3-glycerol phosphate synthase
  Pfam annotation: Domain name=IGPS; Domain location=478-714; Score =166.2; E_value=8.2e-47; Accession=PF00218.12; Description=Indole-3 -glycerol phosphate synthase
  Pfam annotation: Domain name=PPR; Domain location=308-341; Score=3.7; E_value=2.7; Accession=PF01535.11; Description=PPR repeat
  Pfam annotation: Domain name=PPR; Domain location=342-376; Score=6.6; E_value=1.2; Accession=PF01535.11; Description=PPR repeat
  Pfam annotation: Domain name=PPR; Domain location=404-438; Score =27.1; E_value=6e-05; Accession=PF01535.11; Description=PPR repeat
  Pfam annotation: Domain name=PPR; Domain location=439-473; Score =47.3; E_value=5.2e-11; Accession=PF01535.11; Description=PPR repeat
  Pfam module annotation: Pfam domain module=IGPS::PPR::PPR::PPR::PPR; Domain location=478-714::308-341::342-376::404-438::439-473
MSLDTKLILDAISELFDKFDARWAKRDAAREASRCVPVPSQSAAVGVDVVADNWDDLFDNGDDSVEQHYEEPIIADNWGGFFGGGDAAANTELIGHWDNPSSNPDATACVTPEVAVESVHPAAHDRFFNDDSGVPLDLDDDSSVHGGHGSVLSHLLEREADTAFLPHSDQWDGAEARLILHGCTADSFNVASKSVSVRCDLNVTIDGHQHIIDEKRLTACIGGIPAKCSAKCLNVSSMPKLALAIPEEPENNVASEPVVEKPVTNTSTEALADYVHGKGSSLGSTTTLGSRPAPKPSPSPSIMRSRTSAFNNLIYGNAKGRLQAAREVHAIMTCREVPTDSESHELLVDSFLNKNEHAHAKTTLDSMMQQGHLPSLALFKSVMEDAAKVFDEMLIKGEVSPSTVMYTALINTYCTGGNLEGTYEIMVEMEKKMISLDEVTYNMLMRGFCWLGRLDEVRRLIDEIKRRGIHPDLVSHNMLISGYSMKGGWGNVIVDNVVTHFYGALEAVYKRNGVPALFAEVKKASPSRGVLREDFNPVEIVQPYEKNGATCLSILTDKKYFQGSFENLEKVRTSGVKCPLLCKEFVIDKWQIYNARSKGADTILLIAAVLPDLVIRKFVQICEELEMTALIEVDDGIEMERVLNINGVKFTGINNRSLETFVLYTSNTKMLLGRHGDRIREKGILVVGESGLFTPEDVASVQNAGQVCNATSCLLLHKEFAKQFWDRLVGWAQNMKVSNPVEDDCRLGSVVSEEQYEKNKEIDLGCKK

SEQ ID NO: 82481 - protein, 859 aa, Zea mays
  Coding DNA Sequence Number=SeqID_40702
  Homolog annotation: Hit_ID=Q8H3R5; Match level="QueryCoverage=25%, HitCoverage=58%, E-value=4e-85, Identity=71%"; Hit description =Putative indole-3-glycerol phosphate synthase
  Pfam annotation: Domain name=Aldedh; Domain location=463-828; Score= -197.4; E_value=3.2e-07; Accession=PF00171.12; Description=Aldehyde dehydrogenase family
  Pfam annotation: Domain name=IGPS; Domain location=419-655; Score =166.2; E_value=8.2e-47; Accession=PF00218.12; Description=Indole-3 -glycerol phosphate synthase
  Pfam annotation: Domain name=PPR; Domain location=249-282; Score=3.7; E_value=2.7; Accession=PF01535.11; Description=PPR repeat
  Pfam annotation: Domain name=PPR; Domain location=283-317; Score=6.6; E_value=1.2; Accession=PF01535.11; Description=PPR repeat
  Pfam annotation: Domain name=PPR; Domain location=345-379; Score =27.1; E_value=6e-05; Accession=PF01535.11; Description=PPR repeat
  Pfam annotation: Domain name=PPR; Domain location=380-414; Score =47.3; E_value=5.2e-11; Accession=PF01535.11; Description=PPR repeat
  Pfam module annotation: Pfam domain module=Aldedh::IGPS::PPR::PPR::PPR ::PPR; Domain location=463-828::419-655::249-282::283-317::345 -379::380-414
MSLDTKLILDAISELFDKFDARWAKRDAAREASRCVPVPSQSAAVGVDVVADNWDDLFDNGDDSVEQHYEEPIIADNWGGFFAPSTAATDPCCPISWSAKPTPPSFPTQISGDGAEARLILHGCTADSFNVASKSVSVRCDLNVTIDGHQHIIDEKRLTACIGGIPAKCSAKCLNVSSMPKLALAIPEEPENNVASEPVVEKPVTNTSTEALADYVHGKGSSLGSTTTLGSRPAPKPSPSPSIMRSRTSAFNNLIYGNAKGRLQAAREVHAIMTCREVPTDSESHELLVDSFLNKNEHAHAKTTLDSMMQQGHLPSLALFKSVMEDAAKVFDEMLIKGEVSPSTVMYTALINTYCTGGNLEGTYEIMVEMEKKMISLDEVTYNMLMRGFCWLGRLDEVRRLIDEIKRRGIHPDLVSHNMLISGYSMKGGWGNVIVDNVVTHFYGALEAVYKRNGVPALFAEVKKASPSRGVLREDFNPVEIVQPYEKNGATCLSILTDKKYFQGSFENLEKVRTSGVKCPLLCKEFVIDKWQIYNARSKGADTILLIAAVLPDLVIRKFVQICEELEMTALIEVDDGIEMERVLNINGVKFTGINNRSLETFVLYTSNTKMLLGRHGDRIREKGILVVGESGLFTPEDVASVQNAGQVCNATSCLLLHKEFAKQFWDRLVGWAQNMKVSNPVEDDCRLGSVVSEEQYEKIKKLISAARSEGATILYGDGRPQHLRRGLFLAPTITTVVSTFMQIGQEEVFGPVVRVKEFKTESEATNFGLADVVIFHGVLHLQWDPGGINMIYRLEGKPNFKKGGMLGTRPIWYTPAQLAEMSIIRSKNKGRRASSKKYSEHYGLLFIFHLKLLYSFYI

SEQ ID NO: 82482 - protein, 367 aa, Zea mays
  Coding DNA Sequence Number=SeqID_40703
  Homolog annotation: Hit_ID=Q6QP51; Match level="QueryCoverage=38%, HitCoverage=71%, E-value=2e-11, Identity=40%"; Hit description =Putative growth-regulating factor 1
MQAACNCTTGMHPFDFDASSMAAQAHTSCNRRAGYYVRKTAPPLMPMLRLLDCGTDAAIRGNPAHGPTVPAEHVGHGDRERRYSKRDPSLRRKRAPSPPTDQGLAPRKGSTTASGHSGSTPTTNQGFEGWPPEGFDSRLRTRKARDDSGYVRYMAEARATLPRGSGAALANPAPAKPLTASTYEPENLEPDHAPGLRPVKAPSTQGTRSRLTRAQPRTGTVDPGGFTPRPRASSSNGRTFDSPEAQLGQASRRSNLGQIASPTDRIGNSAACPAPTVVPPARMRLTAAESSPRCHRKLRLARPQRSDSTSTSEDGYGEQDRCPIWLAPINKDPPRSKRRQNPKVASLKSCGPGHRTLSGGTPDSPVR

SEQ ID NO: 82483 - protein, 355 aa, Zea mays
  Coding DNA Sequence Number=SeqID_40704
  Gene Ontology: Mol. function=hydrogen-translocating pyrophosphatase activity; Cellular component=membrane; Biological process=proton transport
  Homolog annotation: Hit_ID=P93409; Match level="QueryCoverage=40%, HitCoverage=18%, E-value=3e-68, Identity=95%"; Hit description =Vacuolar H+-pyrophosphatase
  Pfam annotation: Domain name=H_PPase; Domain location=37-355; Score= -272.8; E_value=9.8e-14; Accession=PF03030.7; Description=Inorganic H+ pyrophosphatase
MSGGAPDTVRWHTGQSGAGIAEADSCASGAGISLGAHTPTFEPVPESSVSTVDDRTPEDKERWWRRGLRDISEGKLAIVLLAGGQGTRLGSSDPKGCFMVTVKRRADILVYVAEGQEPKDCTRRKPPSASTSSTTTCTYSASSSSAGTTASRIMVEIEEVPREKVNFSEELLRSTSFARQLADQMTLAKAYVILAKEHGNLQLAWELSSQIVFSIFLSFSLAAMYGVDVAALGMLSTIATGLAIDAYGPISDNAGGIAEMAGMSHRIHERTNALDAVGNTTAAIGKGFAIGSAALVSLALFGAFVSRAAISTVDVLTPKVFIGLIVGAMLPYWFSAMTMKSVGSVAFKMVEEVRR

SEQ ID NO: 82484 - protein, 144 aa, Zea mays
  Coding DNA Sequence Number=SeqID_40705
  Gene Ontology: Mol. function=hydrogen-translocating pyrophosphatase activity; Cellular component=membrane; Biological process=proton transport
  Homolog annotation: Hit_ID=P93409; Match level="QueryCoverage=82%, HitCoverage=15%, E-value=3e-51, Identity=96%"; Hit description =Vacuolar H+-pyrophosphatase
  Pfam annotation: Domain name=H_PPase; Domain location=1-142; Score= -577.7; E_value=0.032; Accession=PF03030.7; Description=Inorganic H+ pyrophosphatase
MNKLDSLILEAVVSLIMAYRFRRPHGFAIGSAALVSLALFGAFVSRAAISTVDVLTPKVFIGLIVGAMLPYWFSAMTMKSVGSAALKMEEVRRQFNTIPGLMEGTTKPDYATCVKISTDASIKEMIPRCSCYADTTDRWNFVWS

SEQ ID NO: 82485 - protein, 172 aa, Zea mays
  Coding DNA Sequence Number=SeqID_40706
  Gene Ontology: Mol. function=hydrogen-translocating pyrophosphatase activity; Cellular component=membrane; Biological process=proton transport
  Homolog annotation: Hit_ID=Q946X5; Match level="QueryCoverage=99%, HitCoverage=21%, E-value=2e-69, Identity=77%"; Hit description =Vacuolar H+-pyrophosphatase
  Pfam annotation: Domain name=H_PPase; Domain location=1-158; Score= -442.8; E_value=2.6e-07; Accession=PF03030.7; Description=Inorganic H+ pyrophosphatase
MVEEVRRQFNTIPGLMEGTTKPDYATCVKISTDASIKEMIPPGALVMLTPLIVGILFGVETLAGVLAGALVSGVQVGGSSSQISIAISASNTGGAWDNAKKYIEAGASEHARTLGPKGSDPHKAAVIGDTIGDPLKDTSGPSLNILIKLMAVESLVFAPFFAAHGGIIFKWL

SEQ ID NO: 82486 - protein, 138 aa, Zea mays
  Coding DNA Sequence Number=SeqID_40707
MKAKSHHQPIILRNTCKNYATSKAEYTNTQLDIPGVSHLISTCYLMQYNGSSSLITCEKQTIRIELLSLQVTALVPTITGMGDHVSGRMSGKVYCQVQSDSVCWGRYSLGEHPLVSEREMCPWAISKCFGDLVSNTSA

SEQ ID NO: 82487 - protein, 63 aa, Zea mays
  Coding DNA Sequence Number=SeqID_40708
MGDHVSGRVRGKVHCQVHSDSVCWGRYSLGEYPLVKSILQVVHQLRLVVGTTSLARSSSLGPI

SEQ ID NO: 82488 - protein, 84 aa, Zea mays
  Coding DNA Sequence Number=SeqID_40709
MERAEDVEDFGGLVGAPPEAAEVKPVLPSDAGEGPSDAPVPAVAGEDPVSAPVPTGEGAQEVVAEPAVEGLTAAAAPSPSQVAK

SEQ ID NO: 82489 - protein, 277 aa, Zea mays
  Coding DNA Sequence Number=SeqID_40710
  Gene Ontology: Mol. function=protein binding
  Homolog annotation: Hit_ID=Q4FX63; Match level="QueryCoverage=60%, HitCoverage=91%, E-value=5e-10, Identity=29%"; Hit description =Proteophosphoglycan ppg4
MAVGSVLSHGAPDTVRGAPSEFPEGSEFSVECPGAPDSPMERAEDVEDFGGLVGAPPEAAEVKPVLPSDAGEGPSDAPVPAVAGEDPVSAPVPTGEGAQEVVAEPAVEGLTAAAAPSPSQVQGFGPAHATATDSANFVAASTVVAENESDDSVSKFFESDDSGSSVVWMEESSDEDLDYFAALDVAAAEASPRVMDAVLPSPSAGRRRRRAVAKRRVSEAEGGHLRADRAGKWELLSSPVGASVGEGELRSLFEGEELRIMLFNYREMGIIPKVEPM

SEQ ID NO: 82490 - protein, 103 aa, Zea mays
  Coding DNA Sequence Number=SeqID_40711
  Homolog annotation: Hit_ID=Q6I583; Match level="QueryCoverage=45%, HitCoverage=13%, E-value=1e-14, Identity=85%"; Hit description =Putative peroxisomal Ca-dependent solute carrier
MASEDVVGKSRGDTVVTTIFNLAEEAKLAREGVKARGHQILTICKSLVAGGVAGGVLPRVSIRVGVLRLLVQGIGGFRDAWHGVCVLGLASLSFMPDRWASPV

SEQ ID NO: 82491 - protein, 649 aa, Zea mays
  Coding DNA Sequence Number=SeqID_40712
  Homolog annotation: Hit_ID=Q6I583; Match level="QueryCoverage=9%, HitCoverage=17%, E-value=2e-14, Identity=68%"; Hit description =Putative peroxisomal Ca-dependent solute carrier
  Subcellular localization annotation: CTP_CleavageSite=41; ConfidenceScore=5.61e-01
MTTPPRHPFSVEGVGAGTSSPYSSDTSPNTDSRSGYCTSTRVFHSMHTPSFSSSSDVLFVFPAFTLFFLPNLTPLPTVAAASRPTLVDAAVYYLSRLQMSMSSSCPSPATNMGDTAVTTIVNLAEEAKLAREGVKAPGHQILTICKSLIAGGVAGGVLPRVSIHVGVLRLLVQGIGGFRDAWHGGRGTSGQLGNGEIVDRRFCLQEAGVIHVSPVRRSGVHNLHGARFCHLPPRCINDRGFCLSLTLRRLPPPHPSTSPLPQPWIHRTPRPGAAVPRHRRPGSTTSSSPHHYAAHLHRAPVPVSSGGCGAHAGGSEVRERDPHGVPVPIRARDAHGRCSGSLESRPRIPIRMRRMTSIPRPAADAADARVDASTSAASSRSRRASAGSEVREQDPHSGREARGGSKVWEGDPHGVPVLVPIRARDAHGRGNGSLESRPWIPIRTQRMTSIPRPAADVADARVDASTSAASSRSRWASADREVRERDPHGGSEARGGSEIPPGFGHEEAAPGSAEPDTRRGGTRGDATRRNDDVERGQAPANADRNDNGALADTDVRKKAEDAEAKRKAEEAEAEARRKKEDEEWDADLAAYYQEQWATEDEGATGAAAATTETDPLAAIAIPVVPTVRVVITFTKSVPLIEPEEFFTID

SEQ ID NO: 82492 - protein, 156 aa, Zea mays
  Coding DNA Sequence Number=SeqID_40713
MVWKVGKARGTQWRGLSRDRGTRGWAGHGEMARRRRQPTPMRNQAQQRAREGKGEGRGGSLPQGAPLEPLGGGEGTTMARVNGGGTGTARRTAGERGQRKSGRERRNWSVSRVADVEAELTVAEGTAGLRRRRGNGLGTAADNSGSSLACAQRGRG

SEQ ID NO: 82493 - protein, 130 aa, Zea mays
  Coding DNA Sequence Number=SeqID_40714
MVQYPEDQIDRRKIPPPTTFAVIHATAVGFVLGVGITSCGRSPSPTIIPNSGGPLRKPAPRARARARFCPSWAAWAGFGPEREEEIEVTEERTPPPSDSQAGNCFYFDICGSEPDSPVNEGKPRCICHLP

SEQ ID NO: 82494 - protein, 101 aa, Zea mays
  Coding DNA Sequence Number=SeqID_40715
MKLQNALSGSSEGNWPWYSDLIRIRPPARQLHRRRPIAAVIRAAAGPRCSREREEEIEVTEERTPPPSDSQAGNCFYFDICGSEPESPVNEGKPQCICHLP

SEQ ID NO: 82495 - protein, 130 aa, Zea mays; identical to SEQ ID NO: 82493
  Coding DNA Sequence Number=SeqID_40716

SEQ ID NO: 82496 - protein, 82 aa, Zea mays
  Coding DNA Sequence Number=SeqID_40717
MEREEEIEVTEERTPPPSDSQAANCFYFDICGSEPDSPVNEGKPRIHFSKHFCKTESLIIEKPYLDSHQHTLESLFFSLVRK

SEQ ID NO: 82497 - protein, 66 aa, Zea mays
  Coding DNA Sequence Number=SeqID_40718
MDYMVFEVAELDGTTMICHTNSKMKGGDEDDGFGYDYGNGHEKLQGHRLMSALGPEGPKDLLLGMS

SEQ ID NO: 82498 - protein, 84 aa, Zea mays
  Coding DNA Sequence Number=SeqID_40719
  Subcellular localization annotation: CTP_CleavageSite=17; ConfidenceScore=5.13e-01
MVGLQVVMRMMVLVMTMVMGVRSVSQVPFRKDLFVERHRDNSTTMRVARKGSRLMGKVCDLCKGLETGILAMLTVKSSLGILFD

SEQ ID NO: 82499 - protein, 127 aa, Zea mays
  Coding DNA Sequence Number=SeqID_40720
MEEPLRTHRKTEGRRGTSWISSPWGRRAQGGGAAACRRLEVEGARAHGAEEQGAMEGAYAGASGPKRPLAMGREEQGAAGDMPTPWTPGRSFSVEEEGAGAPACCSPWRGAWLPAAALGTEKEEGCA

SEQ ID NO: 82500 - protein, 82 aa, Zea mays
  Coding DNA Sequence Number=SeqID_40721
  Subcellular localization annotation: CTP_CleavageSite=45; ConfidenceScore=5.53e-01
MAEPPSSLAAQLTVQGAQKIPAASPFLAVRRGARQLFDKMRSKPRAAAALPFDLHSPRRVSSLSCSLRSPIRDAVETLVVFD

SEQ ID NO: 82501 - protein, 228 aa, Zea mays
  Coding DNA Sequence Number=SeqID_40722
MAWHFVEWARREARRRPLARVSTASRMRLRSEHESDDTRRGEWRSNGRAAAARGLLRILSNSRRAPRRTTRKGLAARIFWAPWTVSWAAREEGGSAYSWAASMEKEPLRTEVVEQEMVASFLLPENRGRASVAGSREGVVQKSEEEQGRRHGCSAHAQENRGEERDELDKQPMGEKGAGRWGCCSPPARGRRKGSRPWSSRKEEGAMAVGLAVVKGSKKGHWKMAGGG

SEQ ID NO: 82502 - protein, 54 aa, Zea mays
  Coding DNA Sequence Number=SeqID_40723
MALMPPALGAHLLHVGWPLVVDAALRALPVRRNAEPCGQSMRLNPDSFRLNPCD

SEQ ID NO: 82503 - protein, 519 aa, Zea mays
  Coding DNA Sequence Number=SeqID_40724
  Gene Ontology: Mol. function=cysteine-type peptidase activity; Biological process=proteolysis
  Homolog annotation: Hit_ID=Q53MK8; Match level="QueryCoverage=66%, HitCoverage=37%, E-value=2e-32, Identity=26%"; Hit description=Ulp1 protease family, C-terminal catalytic domain, putative
MKKRNVSESHTRVLRKVVTKRVKHEELPRQRLNVRCNPQDVIASINILNERQREAIRRKGFSSILDMTVDALCSRSHLQWLMDKLDPKDMTIRPGPGKELKITKDIVHLILGVPNHGGGKPLGIDEAVAASNLRAELGVAKDEFNVAFLQDRLRKGEDDDLSIRCFFLILFNRLLFPTASWGITYHEVLLTEEMHRFHEIDWCQLIFNDLCEAAKKWHNRITTNVSTTIYGCSIVVLLYYLDHLHTAAAPHNKSGTPRIKFFDKNSIKALTKADKRKVRHGAESFGHCENTKVDMDSYYFLLNNQPECRTNIFDAPRPGPMPRPTFNIKLPSIKEMMSSKINDLPHRHRSKFTDILAAYDLEVDKSCVAIKDSIDKIIVKQYDIADKFIELIDEVLRAESENLENETDEPQQPVNSADSARHTVDATQPTPDMPSQASQLETQLGATQFEEIHERQQHIRTVLETFPDESDVVIRSTAVCEPHFFLSTEFCFDVRNISFEGTQIFTPQTTSACICFAQI

SEQ ID NO: 82504 - protein, 861 aa, Zea mays
  Coding DNA Sequence Number=SeqID_40725
MELDVLLGAEEIPEPEGEMVVFEAFFTAGLRLPAHRFVAEVLQRFEVQKRKIGNKIAQFGSCTFTPRTGKTSMEVVELVPCARNKWGNWWDFWFYVSGSEVEDLPGLPVAVMCSHYYVAYPQFEVAEDDEDEGPFDTLPVVRSPAFSLDLRDRDPVTFVREVEDGAARIVGRYVPRTEGLWSWDIRGSNVRLNRVFELNGLPYGGYLGDDTAANVDRRGKKPVAVTEKGPSQEAAPATKKRKIGTVVGGVGVSERFAVELMGTCAALGGRMSSPELRESSARMLKVTGGRWPKNVPLPRAAGEDMFTSRMTRDLKIFPYGRNIAAVVSAVMEKDRQDAAQKRRAVVRIGDPFREAKRARGGVKSAAPGSSKLAPAAKRAAPGPRMSLAGAKAGASGAGKSPSSEPAKGRKVPSLAWSDMGQLPLVPAPVAAPSPTAVEGAKGVLRDLWSTFCASGEISSAAVVKDVAGSVSQQLRQASQQLQHAADFTDRVASGVLTAEFAAEVERLRADAKLAWVENSLACQHAEDLEARLNSLRNRVDKVEASTRVEVERTHAQFVDAYRELDARITAFDAPGQEVGLRFLEWLQEELAVLPTIVTGLMSFASLVTYEGAVNALSHDGCGHFEVFDQSDENFERAIFEVKDPVLKQSAGRSSTGCGMAHAEEVEDLGGLDSALPVTSGVEVPPPSDAGEGTSTVPASTVPTGASEDPAPPPTPTDEDVLKAVVEPAAEDPAAVAGPSQVPTFGPAHATAADNTIFVAAPTVVPASDDSCGSVSLCFESDDSGSSVSWMEESSDEGLDYFAALDVAAVEPSPRVEGSGGLPGASTRYRRRRAVAKPRVSESSRRGHRIGMEGDRLRVDRT

SEQ ID NO: 82505 - protein, 888 aa, Zea mays
  Coding DNA Sequence Number=SeqID_40726
MELDVLLGAEEIPEPEGEMVVFEAFFTAGLRLPAHRFVAEVLQRFEVQKRKIGNKIAQFGSCTFTPRTGKTSMEVVELVPCARNKWGNWWDFWFYVSGSEVEDLPGLPVAVMCSHYYVAYPQFEVAEDDEDEGPFDTLPVVRSPAFSLDLRDRDPVTFVREVEDGAARIVGRYVPRTEGLWSWDIRGSNVRLNRVFELNGLPYGGYLGDDTAANVDRRGKKPVAVTEKGPSQEAAPATKKRKIGTVVGGVGVSERFAVELMGTCAALGGRMSSPELRESSARMLKVTGGRWPKNVPLPRAAGEDMFTSRMTRDLKIFPYGRNIAAVVSAVMEKDRQDAAQKRRAVVRIGDPFREAKRARGGVKSAAPGSSKLAPAAKRAAPGPRMSLAGAKAGASGAGKSPSSEPAKGRKVPSLAWSDMGQLPLVPAPVAAPSPTAVEGAKGVLRDLWSTFCASGEISSAAVVKDVAGSVSQQLRQASQQLQHAADFTDRVASGVLTAEFAAEVERLRADAKLAWVENSLACQHAEDLEARLNSLRNRVDKVEASTRVEVERTHAQFVDAYRELDARITAFDAPGQEVGLRFLEWLQEELAVLPTIVTGLMSFASLVTYEGAVNALSHDGCGHFEVFDQSDENFERAIFEVKDPVLKQSAGRSSTGCGMAHAEEVEDLGGLDSALPVTSGVEVPPPSDAGEGTSTVPASTVPTGASEDPAPPPTPTDEDVLKAVVEPAAEDPAAVAGPSQVPTFGPAHATAADNTIFVAAPTVVPASDDSCGSVSLCFESDDSGSSVSWMEESSDEGLDYFAALDVAAVEPSPRVEGSGGLPGASTRYRRRRAVAKPRVSESSRRGHRIGMEGDRLRVDRTGRQELLSSLVGASIDEGELRNLLRVRN

SEQ ID NO: 82506 - protein, 100 aa, Zea mays
  Coding DNA Sequence Number=SeqID_40727
MGIFLPVTPKSYRFLPSGLYRIPFIVPYSQHNDIARIARNFIIKMNLFVRQITSMASSSEESYYRPRESAIRTYALTKANGSYSQASRRIDQMPISQMWI

SEQ ID NO: 82507 - protein, 45 aa, Zea mays
  Coding DNA Sequence Number=SeqID_40728
MAVGVSEALYAKAFYALLYLLCDSPSSEIVVLDPVSGLVGLDPRD

SEQ ID NO: 82508 - protein, 46 aa, Zea mays
  Coding DNA Sequence Number=SeqID_40729
MAVGVSEALYAKAGFYALLYLLCDSPSSEIVVLDPVSGLVGLDPRD

SEQ ID NO: 82509 - protein, 81 aa, Zea mays
  Coding DNA Sequence Number=SeqID_40730
MQDAARRALSQYCSLFSGVVVSELPELFQLKCLSPALEARPHLNGNNRQSLGSSPTRPLTGSSTTISLDAKVVIIVRSAAE

SEQ ID NO: 82510 - protein, 129 aa, Zea mays
  Coding DNA Sequence Number=SeqID_40731
MAELPELFQLKCLSPALEARPHLNGNNPSIPRILFDEATDRIKYHNLTRCTMDQAVSLAARRRRFESSFYPCKIRAHRLGVQCLTDPDCRRAVTALVPTITVMGDHVSGRVRGYVHCQVHSGFGKHYAK

SEQ ID NO: 82511 - protein, 164 aa, Zea mays
  Coding DNA Sequence Number=SeqID_40732
MRAALQEARRRHARGVVAAVGRAAEARLRAAEAELERARRRGADLEERLRQLAGEGQAWLGVARSHEAVAAGLRATLDKVLQQPAVAAAGGGECGVAEDAQSCCFVASPSGLVAGDSLLYLGEDQKGLGKGQGVEEEQQGRPQQEGDQVRVGCDSISGSRTSLH

SEQ ID NO: 82512 - protein, 104 aa, Zea mays
  Coding DNA Sequence Number=SeqID_40733
MAHFYWTKTRLYWESQRTQPQKIWMVGFPVLFFNQHAGTSLHRENEIAHKGLDGPPCRGSSPMIMIMLMVMKTPGCLWCNLCSGKEEGVEANLQEFQDFDEFED

SEQ ID NO: 82513 - protein, 59 aa, Zea mays
  Coding DNA Sequence Number=SeqID_40734
MGSRHSACSAEAGCRGSFVLLFSRPPAGRGCLWCNPCSSKEDDVEVDLQEFQDFDEFED

SEQ ID NO: 82514 - protein, 84 aa, Zea mays
  Coding DNA Sequence Number=SeqID_40735
MRVVWDALGQVIREVLCWVLVFGHWEMEASVMASISLLRDLGTGIVPRLFPEGRGYLWCNLCSDKEEGVEADLHEFQDFDEFED

SEQ ID NO: 82515 - protein, 84 aa, Zea mays
  Coding DNA Sequence Number=SeqID_40736
  Subcellular localization annotation: CTP_CleavageSite=68; ConfidenceScore=5.19e-01
MFSLQVAMRMMVLVLTLVMVAFGAIYAQVEKKASRRISRSSRTLTSSRRGLAATPSRLPVKAAFIYVSFSHFDYCKDYMDVLDI

SEQ ID NO: 82516 - protein, 112 aa, Zea mays
  Coding DNA Sequence Number=SeqID_40737
MAHRSYSGPSEASSPPFSPLCLWIHGLVPAIEFAVAFSPSLPNSGDPRANLARASLNFGDLTAAERSGAARNRLFHPDNEQSEVPECVVGDLPEQPPGEGKYPLTHYVLHTL

SEQ ID NO: 82517 - protein, 123 aa, Zea mays
  Coding DNA Sequence Number=SeqID_40738
MAGMAHRSYSGPSEASSPPFSPLCLWIHGLVPAIEFAVAFSPSLPNSGDPRANLARASLNFGDLTAAERSGAARNRLFHPDNEQSEVPECVVGDLPEQPPGEGKLERDHDLWVVGGLFSNAMN

SEQ ID NO: 82518 - protein, 224 aa, Zea mays
  Coding DNA Sequence Number=SeqID_40739
  Homolog annotation: Hit_ID=Q5WMZ9; Match level="QueryCoverage=43%, HitCoverage=8%, E-value=2e-24, Identity=49%"; Hit description =Putative RNA polymerase II
MPIAATQCTMPSSARNECATVLKTWVAILLRAPLQVNVEQKLDLRRILCVMFFLVAQALLHKGQISVNQIEHAETMERGNCSPMDTVTLNWEIICCNAQAMQRSGRPIESICSRLKAIEGCIRGNLMGKLKEPFVYGPHPPPGKTGAKYIIMDDGQRLDLQYVKKRNDQHLELGYKFIAELRKDGSLLVLRIGSLLWNKKQEKYNEHKKAKKDSGYVVIVTIRL

SEQ ID NO: 82519 - protein, 132 aa, Zea mays
  Coding DNA Sequence Number=SeqID_40740
  Homolog annotation: Hit_ID=Q1L5Y6; Match level="QueryCoverage=36%, HitCoverage=6%, E-value=4e-17, Identity=81%"; Hit description=RNA polymerase II largest subunit
MSTEALNRNDPLKAKSNDFRLKEPFVYGPHPPPGKTGAKYIIMDDGQRLDLQYVKKRNDQHLELGYKLVVSGLTLYSGCRTKKGWFPTGSAYRKAKAKNAIIPMVSFDSLPWNKKQEKYNEHKIPRKTQVTL

SEQ ID NO: 82520 - protein, 168 aa, Zea mays
  Coding DNA Sequence Number=SeqID_40741
MDGGNKYDGSASEFSDFADSGSSVEWTEESSEEDLDYFAALDVAAAEASPHAAGTEYVPGPSTGRRRRRAVAKSRVSGAEGGRLRACMMKLCALAHLAMLAKALRAWSGVFVMLDWCVYSRSWRGQFGVVVFAFVTLRPTVPSGNFCADGLCSGLRVFALAVLVRLHP

SEQ ID NO: 82521 - protein, 185 aa, Zea mays
  Coding DNA Sequence Number=SeqID_40742
  Homolog annotation: Hit_ID=Q6QP51; Match level="QueryCoverage=33%, HitCoverage=27%, E-value=3e-08, Identity=64%"; Hit description =Putative growth-regulating factor 1
MQAACNCTKGMHPFDFDASDMEAQAHTSCGRKRQSKRLQAHVPSWDSERTLSHGVKTTRPCSIPRTTRACTTTAPRTTRPVALTPRQGRRHLWQAKRATIHLRHNDRVKKGTGKGDTPKGILLREGSGPRALLLIRGSKAGPSKGFRQPPQSTRAPRPLLVRGSKAGPSEGFDSCLRPLGLRAHY

SEQ ID NO: 82522 - protein, 315 aa, Zea mays
  Coding DNA Sequence Number=SeqID_40743
  Homolog annotation: Hit_ID=Q6QP51; Match level="QueryCoverage=13%, HitCoverage=19%, E-value=4e-10, Identity=74%"; Hit description =Putative growth-regulating factor 1
MQAACNCTKGMHPFDFDASDMEAQAHTSCNRRAGYYVRETAPPLAPVPRLLDCGTGAATRGDPAHGPTVPTEHIGHGAGDTFGRRSGRRFTSAIMTASKKRAPSPPTDQRFKGWPLERVSTTASEHSGLRAHYWSEVRRLAPRKGSIAASGHSGSAPTTDQGFTGWPPEGFDSRLRSAIGSSASPDPRARAQPRPRKTISASPDPRARTPPRPTPGLELNLDHGRRSPPRPTPGLRLNLDLGRRSPPSPTPGLGLNLDLGRRSPPRPTPGLGLSLDLGGASASPDLGLGPTTSQGAIITLPLASSGYGEQDRRPI

SEQ ID NO: 82523 - protein, 90 aa, Zea mays
  Coding DNA Sequence Number=SeqID_40744
  Gene Ontology: Mol. function=structural constituent of ribosome; Cellular component=intracellular; Biological process=translation
  Homolog annotation: Hit_ID=Q014K1; Match level="QueryCoverage=52%, HitCoverage=52%, E-value=9e-15, Identity=68%"; Hit description=[J] KOG3475 60S ribosomal protein L37
  Pfam annotation: Domain name=Ribosomal_L37e; Domain location=45-90; Score=71.0; E_value=3.8e-18; Accession=PF01907.9; Description =Ribosomal protein L37e
  Subcellular localization annotation: CTP_CleavageSite=96; ConfidenceScore=5.74e-01
MAPSNRSHSQLAAAPTTSTPSADLAQLLATTLPACSRAPRPARQGKGTSSFGKRRNKTHTLCIRCGRRSFLLQKSTCSSCGYTAARIRKF

SEQ ID NO: 82524 - protein, 89 aa, Zea mays
  Coding DNA Sequence Number=SeqID_40745
  Gene Ontology: Mol. function=structural constituent of ribosome; Cellular component=intracellular; Biological process=translation
  Homolog annotation: Hit_ID=Q014K1; Match level="QueryCoverage=52%, HitCoverage=51%, E-value=2e-14, Identity=70%"; Hit description=[J] KOG3475 60S ribosomal protein L37
  Pfam annotation: Domain name=Ribosomal_L37e; Domain location=45-89; Score=69.2; E_value=1.3e-17; Accession=PF01907.9; Description =Ribosomal protein L37e
  Subcellular localization annotation: CTP_CleavageSite=64; ConfidenceScore=5.69e-01
MAPSNRSHSQLAAAPTTSTPSADLAQLLANHTPSVQPRPRPARQGKGTSSFGKRRNKTHTLCIRCGRRSFLLQKSTCSSCGYTAARIRK

SEQ ID NO: 82525 - protein, 80 aa, Zea mays
  Coding DNA Sequence Number=SeqID_40746
  Subcellular localization annotation: CTP_CleavageSite=47; ConfidenceScore=5.24e-01
MAEALAAMAGGNKLAGAKGKGLAGEGTGSCSVTKVPVSECLVPRLSCAKTVSNEFGLSSNFPRMCSRKTLSDTGVSQRSS

SEQ ID NO: 82526 - protein, 59 aa, Zea mays
  Coding DNA Sequence Number=SeqID_40747
  Subcellular localization annotation: CTP_CleavageSite=40; ConfidenceScore=5.16e-01
MAGGIKLAGAKGKGLAGEGTGSCSVTKVPVSECLVPRLSCAKTVSNEFGLSSNFPRMCS

SEQ ID NO: 82527 - protein, 124 aa, Zea mays
  Coding DNA Sequence Number=SeqID_40748
  Subcellular localization annotation: CTP_CleavageSite=63; ConfidenceScore=5.31e-01
MAGGNKLAGAKGKGLAGEGTGSCSVTKVPVSECLVPRLSYAKTVSNEFGLSSNFPRMCSRKTLSDTGVSQPSPLKGISSRDSGQSPPGVKRRVRLIGKRVMIVIIRAKLLFECHSLCNFRRKSF

SEQ ID NO: 82528 - protein, 124 aa, Zea mays
  Coding DNA Sequence Number=SeqID_40749
  Subcellular localization annotation: CTP_CleavageSite=63; ConfidenceScore=5.40e-01
MAGGIKLAGAKGKGLAGEGTGSCSVTKVPVSECLVPRLSCAKTVSNEFGLSSNFPRMCSRKTLSDTGVSQPSPLKGISSRDSGQSPPGVKRRVKLIGKRVMIVIIRAKLLFECHSLCNFRRKSF

SEQ ID NO: 82529 - protein, 120 aa, Zea mays
  Coding DNA Sequence Number=SeqID_40750
MAILGVPLRAVSSFNVEDRNRDPIAIRFRASRNRQSSFGDQMIQFFGFYEIEDPEHLFGEGKNWGVVRFAVVPLMGLGVCGPLCQGGDENDGFGIDFGNGKEEGVEADLQEFQDFDEFED

SEQ ID NO: 82530 - protein, 68 aa, Zea mays
  Coding DNA Sequence Number=SeqID_40751
MAILGVPLRAVSSFNVEDRNRDPGARAVSRVALRGDENDGFGIDFGNGKEEGVEADLQEFQDFDEFED

SEQ ID NO: 82531 - protein, 47 aa, Zea mays
  Coding DNA Sequence Number=SeqID_40752
MGGQADGGTTVCAAGSRCPRVPFRFVIAALLDVKRNIWTPQGQGQAD

SEQ ID NO: 82532 - protein, 43 aa, Zea mays
  Coding DNA Sequence Number=SeqID_40753
MGGQADGGTTVCAAGSRCPRVPFRFVIAALLDVKRNIWTPQGQ

SEQ ID NO: 82533 - protein, 103 aa, Zea mays
  Coding DNA Sequence Number=SeqID_40754
  Gene Ontology: Mol. function=voltage-gated chloride channel activity; Cellular component=membrane; Biological process=chloride transport
  Homolog annotation: Hit_ID=Q6Z673; Match level="QueryCoverage=53%, HitCoverage=7%, E-value=3e-22, Identity=96%"; Hit description =Putative chloride channel protein
  Subcellular localization annotation: CTP_CleavageSite=39; ConfidenceScore=5.20e-01
MIGAAVGAVFGGSAAYLINSALPGNAAVAQPQAYALVGMAATLASVCSVPLTSVLLLFELTKDYMILLPLMCPYDTTTVSKTIGHLCEMQLASYTDVEIIQAV

SEQ ID NO: 82534 - protein, 264 aa, Zea mays
  Coding DNA Sequence Number=SeqID_40755
  Gene Ontology: Mol. function=translation initiation factor activity; Cellular component=signalosome complex; Biological process =regulation of translational initiation
  Homolog annotation: Hit_ID=Q8GVI0; Match level="QueryCoverage=70%, HitCoverage=47%, E-value=1e-78, Identity=73%"; Hit description =Putative eIF3e
MAAPSLSRGGCRRHLTLVLAELALSPVVPLPAEANTPSPRPSLLDSPIPGLPRLRPHLLPMVGMAATLASVCSVPLTSVLLLFELTKDYRILLPLMIGPDQIEALYQYAKFQFECGNYSGAANYLYQYGALCTNSERNVSALWGKLAAEILMQSWDLALEELNRLKEIIDSKNFSSPLNQLQNRIWLMHWALFIFFNHIRYLNAIQTNAHHLIRYLATAVVVNKRRRNMLKELIKVIQQEHHSYKDPITEFLECLYVNYVVVGF

SEQ ID NO: 82535 - protein, 150 aa, Zea mays
  Coding DNA Sequence Number=SeqID_40756
MRPFCLTTDSAVQLLWTASKRWLRGSLSYTAAHATTGVPIPPMWPICLAVNPVVHASDEVGPMRISPSGNWSAWTHEQLERADDAARCVDIVAETAATQTTVQQCHIMGTDLVLGTFSYTPILDSLFREQIYHRTESRSLSFEVLAKHRP

SEQ ID NO: 82536 - protein, 60 aa, Zea mays
  Coding DNA Sequence Number=SeqID_40757
MDSAVQLLWTASKRQLRGSLSYTTAHATTAFGTRDYGKPPHLDAYGYGDDIGAGKAACEA

SEQ ID NO: 82537 - protein, 110 aa, Zea mays
  Coding DNA Sequence Number=SeqID_40758
  Gene Ontology: Mol. function=protein phosphatase type 2C activity; Cellular component=nucleus
  Homolog annotation: Hit_ID=Q2HW33; Match level="QueryCoverage=87%, HitCoverage=38%, E-value=2e-17, Identity=40%"; Hit description =Protein phosphatase 2C-like
MYDKLPRSRRLDAVQSSCTALSIVKQGGLMVVANVDDSRGYYLADEPGVHFVWQPNQESLVLVMLRAFDDYYIEDCGVILAPEVTQRRIDNSDQFVILATVRVAFVSACL

SEQ ID NO: 82538 - protein, 100 aa, Zea mays
  Coding DNA Sequence Number=SeqID_40759
  Gene Ontology: Mol. function=protein phosphatase type 2C activity; Cellular component=nucleus
  Homolog annotation: Hit_ID=Q2HW33; Match level="QueryCoverage=59%, HitCoverage=17%, E-value=2e-13, Identity=60%"; Hit description =Protein phosphatase 2C-like
MGEIESAFIHFVSFGDLDNNTFKGLTSLLGYYLADEPGVHFVWQPNQESSVVVMSRAFDDYYIEDCGVILAPEVTQRRIDNSDQFVILATVRVAFVPAYL

SEQ ID NO: 82539 - protein, 93 aa, Zea mays
  Coding DNA Sequence Number=SeqID_40760
  Subcellular localization annotation: CTP_CleavageSite=33; ConfidenceScore=5.16e-01
AQIQSTPASAPDAPAWLSRRDLFFSGESFDQPVARPRPTCPLCRRPLDLLLRPPHTCSPAQGVARQPACAAPAAACLGAQRPHLGYGHGQPPA

SEQ ID NO: 82540 - protein, 164 aa, Zea mays
  Coding DNA Sequence Number=SeqID_40761
MAPRLGSQGRMPEHAGEPPRWRVYRAGRLPRHALRRGACMRRPEEQVERPAAQGARRPGPSNRLPCQVGEAGRGCVRGRRKLDGARIAARDNLARQRAQDNSVTKLHGKFAEDEKRTRYEGSIQHKEKEENSPGRRTRRRRRGRAETAKLGVWALAGVLWIWAL

SEQ ID NO: 82541 - protein, 270 aa, Zea mays
  Coding DNA Sequence Number=SeqID_40762
MAPRLGSQGRMPDHTGEPPRWRVYRAGRLPRHALRRGACMRRPEEQVERPAAQGARRPGPSNRLPCQVGEAGRGCVRGRRKLDGARIAARDNLARQRAQDNSVTKLHGKFAEDEKRTRYEGSIQHKEKEENSPGRRTRRRRRGRAETAKLGVWALAGVLWIWALGSATTRRSRPPANPLNMGVDMHLVKMLPTLILTDLEELEVAKWTGAREKNSEKSDEKEEALKGRLKVGMWQGHRYHEGLKVIMDKDVQDEVNGYKNQGYKYHKGWS

SEQ ID NO: 82542 - protein, 109 aa, Zea mays
  Coding DNA Sequence Number=SeqID_40763
MERWAMRGGEGAAAGLGALLRCGCSKPIDAILEDLLDLWVRTHTRFQCATLILIDLEELEVAKWTGARGKTTDRKGNNYSLRLLKDKEKNKTCRTGTRAPQRMKLKRAL

SEQ ID NO: 82543 - protein, 108 aa, Zea mays
  Coding DNA Sequence Number=SeqID_40764
  Subcellular localization annotation: CTP_CleavageSite=47; ConfidenceScore=5.04e-01
MGLPIEDAAMVIRWTSHQRPSNPRKTMWTTSTTIKPCHSANPLNRSVDMHLVKMLPTLILTDLEELEVAKLKGKCALGPFLSILVIECKHKGLNVNLCTWMNKVKIMK

SEQ ID NO: 82544 - protein, 59 aa, Zea mays
  Coding DNA Sequence Number=SeqID_40765
MGLDEDEGDVEARAAANPLNRSVDMHLVKMLPTLILTDLEELEVVKWTGARVKNSEKRE

SEQ ID NO: 82545 - protein, 95 aa, Zea mays
  Coding DNA Sequence Number=SeqID_40766
MGVDMHLVKMLPTLILTDLEELEVAKWTGASGKNSEKRQNLQGVKERGTVNDEIDEALSPNRNGKEGASRARFKVWSRYGKGQGNTKQRHNKGWS

SEQ ID NO: 82546 - protein, 95 aa, Zea mays; identical to SEQ ID NO: 82545
  Coding DNA Sequence Number=SeqID_40767

SEQ ID NO: 82547 - protein, 228 aa, Zea mays
  Coding DNA Sequence Number=SeqID_40768
MTRGPDLSVPVWARAWVKWAARGRKAKWAEFQVAAQFSDFFYQFQIQNLGVTNPTPLKNNLVLEIYLSWCSSFLDVVDPFFSGLELINSRSKVKTKGLCNYLMGKMRSRLVSPDAIVDITPQPITLNQRSKSDRIRSPIPKVTLGTGFQSVKSIFVFRKEKDRHHSEILPRASPGIPCRTAITAKSSRGPSQESLAGPPSQQNPPEGLPTLTTPLLPLPLSGKESPGG

SEQ ID NO: 82548 - protein, 107 aa, Zea mays
  Coding DNA Sequence Number=SeqID_40769
MQESLAGPPSQQNPPEGLPRNPLQDRHHSKILPRAFPGIPCRTAITAKSSRGPPYTDHSPTALAPFGYQDDLQMTRVLTASRSNTTNMLPAADYPGHDETEAHGGAQ

SEQ ID NO: 82549 - protein, 195 aa, Zea mays
  Coding DNA Sequence Number=SeqID_40770
MQESLAGPPSQQNPPEGLPRNPLQDRHHSKILPRAFPGIPCRTAITAKSSRGPPYTDHSPTALAPFGYQDDSSDPRDLTASRSNTNIHGIGKCRGFWRKNPETQGTGSLDGGFISNKWRGSLTKAPARRGIGWAEPSDQKRRAQIRSGFPWTGMHPEPLDPRSAVHDLKRHDPNAVRPISSQRLRSKRVKGYPLA

SEQ ID NO: 82550 - protein, 339 aa, Zea mays
  Coding DNA Sequence Number=SeqID_40771
KCRGFWRKNPETQGTGSLDGGFISNKWRGSLTKAPARRGIGWAEPSDQKRRAQIRSGFPWTGMHPEPLDPRSAVHDLKRHDPNAVRPISSQRLRSKRAKGYPYDLISTVDDQINGDHASSSSHQPSRVLRRRRAVEMNGCDPNRPPPSTIVKLNEATRCARHHGHNGCILTGIKVWMKLGHGAVRIHGGDELRRAIAAHWPSNPTRDRFLHLRRNPPMLSVRTAAAKESTAAASTAAARRVSGGGDFCSGGKGLRKPLTGPKVPATAREQLRRKLSFTALHPQCALSTLSRFGDGGPALDSYTQVGGVGPGRYGELLHGPRGKRRQIRLERARARFARW

SEQ ID NO: 82551 - protein, 293 aa, Zea mays
  Coding DNA Sequence Number=SeqID_40772
  Subcellular localization annotation: CTP_CleavageSite=59; ConfidenceScore=5.46e-01
MQHSIPSVAAVRAVDPATNRQPQARWTSSRGQQAHAQPPLRARCSDASRRHALDRQRCSAAIVGAASSRGSGRQGDRESSLSSSEKRNPDSLAPSEFGDSTLTELRFAHSPICAPRLRSIKVGDGIGTTNGGGGMTLSSLKNGGHPVLAALVGRLPKPGGAGVGGLQRGAVGSTYGVDSGGTGVDQVHHYPVNGKPNPIVVEDSFTVCADELPDDGTADHLNDASKSSASTIHDENCVSGAVGHVMAGGRSKNDFSVAFVDLLSATVRNRSVDARWRDSADNVLNVNSCVNRE

SEQ ID NO: 82552 - protein, 298 aa, Zea mays
  Coding DNA Sequence Number=SeqID_40773
  Subcellular localization annotation: CTP_CleavageSite=72; ConfidenceScore=5.45e-01
PPAPDAIAGSASIRWSGHHPRARPPAVDPATNRQPQARWTSSRGQQAHAQPPLRARCSDASRRHALDRQRCSAAIVGAASSRGSGRQGDRESSLSSSEKRNPDSLAPSEFGDSTLTELRFAHSPICAPRLRSIKVGDGIGTTNGGGGMTLSSLKNGGHPVLAALVGRLPKPGGAGVGGLQRGAVGSTYGVDSGGTGVDQVHHYPVNGKPNPIVVEDSFTVCAEELPDDGTADHLNDASKSSASTIHDENCVSGAVGHVMAGGRSKNDFSVAFVDLLSATVRNRSVDARWRDSADNVLN

SEQ ID NO: 82553 - protein, 226 aa, Zea mays
  Coding DNA Sequence Number=SeqID_40774
MQIIERKCEAQRGAGIRSKLNFYVVLCTVGKKLVKLTDQPGNLIPLDRAGVSDLSFNSLARARVTGPGGRGGAWTGEDGAWAREGAAGVDVLVLVLMSSSEPFLRFSQRTCPIHYFRSKTHVWGGFAQFRCRTSPIPKTGVGCIQSTSFLPPEPFLRFSQRTCPIHYFRSKTHVWGGFAQFRCRTSLILKTVIGVHTKHEVLPPEAFFRFSLQTCPIHYFRSKTHV

SEQ ID NO: 82554 - protein, 180 aa, Zea mays
  Coding DNA Sequence Number=SeqID_40775
MALSPLLLAERRHMGVCKKDESVLDRPLALCRGSGAALANPAPAKPLAASTYQPENLGPDRALGLWPARMREQLDQPNAACAAPTAEPPDRVRLTAAKAGLGRHRKLRLARPQGSDSGSAPEDGELRSAQPRARTRAHPRKTANSAPPDPGLCDGTSQERLTRLADITAHQRYRYAEAIT

SEQ ID NO: 82555 - protein, 325 aa, Zea mays
  Coding DNA Sequence Number=SeqID_40776
  Homolog annotation: Hit_ID=Q5JLP6; Match level="QueryCoverage=22%, HitCoverage=32%, E-value=2e-27, Identity=66%"; Hit description =Putative S-formylglutathione hydrolase
MGGHGALTIYLKNTDKYKSVSAFAPIANPINCPWGQKAFSNYLGSTKSDWEGQSDKFLAEQQLLPRNFEEACKHGPVVPSTEAFKMSCDLTRKNQIAICLTCQSFWCFCAALDEWHIFSRIRKIASNHRDQAKAARLAAGYILIAACAAPTAEPPDRVRLTAAKAGLGRHRKLRLARPRARTRAQPRKTANSAPPDPGLGLGLSPGRRRTPLRPTQGSDSGSALEDDELRLARPQGSDTGSAPEDGELRSARPRARTRAQPRKTVNSAPPDPGLGLGLSPGRRRTPLHPTQSSDSGSAPEDGELRFARPHGSDSALASADGLRLA

SEQ ID NO: 82556 - protein, 63 aa, Zea mays
  Coding DNA Sequence Number=SeqID_40777
MTDAEKEVATERQMDSPPRCDCGDRAVIDEDYEKQFCCPNIDYETRKCSWESYDDKGERLEAA

SEQ ID NO: 82557 - protein, 176 aa, Zea mays
  Coding DNA Sequence Number=SeqID_40778
  Gene Ontology: Mol. function=nucleic acid binding
MTSMVLSSLRKQGNVSRIHAAPPAALLQGSSTSPTATEPRGFGFIQYFDPEDASDAKKKPADMRAREKISVRCRSYDGRLCSRSLGLNDSPGVDHGPKAEATHQHLSESTIQGNLEDLGSSNTLILRMLLMQSPKPKLLASTYAKALFKVPSSSTSGEIFVAFPSCQQIKECKPHC

SEQ ID NO: 82558 - protein, 143 aa, Zea mays
  Coding DNA Sequence Number=SeqID_40779
  Gene Ontology: Mol. function=nucleic acid binding; Biological process= RNA splicing
  Homolog annotation: Hit_ID=Q7XI49; Match level="QueryCoverage=64%, HitCoverage=47%, E-value=6e-24, Identity=54%"; Hit description =Putative SC35-like splicing factor SCL30a
MQKESFREPRGFGFIQYFDPEDASNAKYHMDGKMLLGRKIAVVFVEENRKKPSDMRAREKISGRGRSYDGRLRSRSPGLYDSPRVDHGPKAEATRQHFSESTIQGYLNVYYVGIPKSLMSEVSCEPMNLDVGRADQCAGAYVV

SEQ ID NO: 82559 - protein, 285 aa, Zea mays
  Coding DNA Sequence Number=SeqID_40780
  Gene Ontology: Mol. function=transferase activity, transferring glycosyl groups; Cellular component=integral to membrane; Biological process=metabolic process
  Homolog annotation: Hit_ID=Q8LJZ7; Match level="QueryCoverage=76%, HitCoverage=42%, E-value=2e-64, Identity=58%"; Hit description =Putative glucosyl transferase
MSLDSSAFKVLDQMSKSARADDLVVNPFEELESGSMALLAEVTGEKVIVVGSVLLCRSPSLYPQSMSCDTRRCMAWLDAKAPKSVVYVSFGSAKCMPPIQLRQLGMAFASCPSPVLWLIKDADSLPNNIKDLLHENTVADDVAGSKCLVVRGWALHVAILAHPASDGFMALCGWGSTLEVVAAGLPMAAWPFFAEQFINEQLIMDVLGIGLSVAVMKPIENVLIASNMGGAVVMIYAPVFWSCLTSFTLGIHGQIVGVLFLPFLVIQLNISIAVQQRFLWDPGGD

SEQ ID NO: 82560 - protein, 643 aa, Zea mays
  Coding DNA Sequence Number=SeqID_40781
  Homolog annotation: Hit_ID=Q8LJZ7; Match level="QueryCoverage=34%, HitCoverage=42%, E-value=6e-65, Identity=59%"; Hit description =Putative glucosyl transferase
  Pfam annotation: Domain name=UDPGT; Domain location=144-576; Score= -152.6; E_value=0.0062; Accession=PF00201.9; Description=UDP -glucoronosyl and UDP-glucosyl transferase
MASSSPVHTQLIQALELQTRALLSELDKRLDSKWGTKWESRVGAIESRSADSTRAMSDFSSALHSDVEAHLTAADAATDSNLLQIEAELDPRVSALKSSVHALDLWCPRVDSSIEGLHASVDFISTEVSKMGILWNHDVCVDDLARPGLFGAHRSAACFDASASAPSIPASVIADNWGGFFDDGEQYCAALDALPNSIHSDLLNTFARHSHDHLFVLNPVAAQDSSAEEAMATMEAAADAGDPARLVQSSPSPSLLIAGNLLPPSLTMPQLQAEVVDKQYRVAMSPPPPLPVVDELYREEASPPPPIHDDAAGVMSLDSSAFKVLDQMSKSARADGLVVNPFEELESGSMALLAEATGEKVIVVGSVLLCRSPSLYPQSMSCDTRRCMAWLDAKAPKSVVYVSFGSAKCMPPIQLRQLGMAFASCPSPVLWLIKDADSLPNNIKDLLHEHTVADDVAGSKCLVVRGWALHVAILAHPASDGFMALCGWGSTLEVVAAGLPMAAWPFFAEQFINEQLIMDVLGIGLSVAVMKPIENVLIASNMGGAVVMIYAPVFWSCLTSFTLGIHDIGATSGRPNLPRWQHGKTWKHSSTPFLRLQLGGKLVLMEEGMSVSLHQSLEVRQSMFEEMQQIMKLQGSQAKHQGL

SEQ ID NO: 82561 - protein, 170 aa, Zea mays
  Coding DNA Sequence Number=SeqID_40782
  Gene Ontology: Mol. function=DNA binding
MWKWSPLSLLWPTSAPGLLRGHAWHSAPQTGAAQAKGSGAVAQDGKKKKKKNRDNEKPHSAALVVAAATGGRGDHSKRPRPPRGNGGTCPVHPNGRHSAVECHEFIDLANRVSARREQSSGDGSSPHHRSGKEKADDEEVAVAEPDLEYQSPEGVLKDVFTGDSNSGEGN

SEQ ID NO: 82562 - protein, 167 aa, Zea mays
  Coding DNA Sequence Number=SeqID_40783
  Gene Ontology: Mol. function=DNA binding
MVPTLFALADKCARAAKGHAWHSAPQTGAAQAKGSGAVAQDGKKKKKKNRDNEKPHSAALVVAAATGGRGDHSKRPRPPRGNGGTCPVHPNGRHSAVECHEFIDLANRVSARREQSSGDGSSPHHRSGKEKADDEEVAVAEPDLEYQSPEGVLKDVFTGDSNSGEGN

SEQ ID NO: 82563 - protein, 117 aa, Zea mays
  Coding DNA Sequence Number=SeqID_40784
MSEAILVERGRRRVLSAINAGGRAAQSPYVMLRPLAYVTDNKPCGSIRPSTGWGAEALRIEPGHASIPDLCLGHVTAGPAMVTLTAMPAPVVDWPMTSVLNVFVGPCAGCLESLRRF

SEQ ID NO: 82564 - protein, 150 aa, Zea mays
  Coding DNA Sequence Number=SeqID_40785
MALGEAVELGGCRSNSLAADNAPGVALDGVRDVCAAGGPVAACQRNGQDVINVVGAHHLSESIRPLTGWGAEALRIEPGHASIPDLCLGHGTSSPGTLLWVVRSSLGGVWTLSNGSELLYFGGPGCAHRGPVSSGPDGVASENATSTAHE

SEQ ID NO: 82565 - protein, 272 aa, Zea mays
  Coding DNA Sequence Number=SeqID_40786
  Subcellular localization annotation: CTP_CleavageSite=42; ConfidenceScore=5.01e-01
MPPSTRGFLPHQRRPFSPTRCGGRDERTALAEIPRRFDSPVVLATKARRFSFPLTKTAEIVEALHSYSIFLGLFLASVVREPPAHNSIHRHHIVCGSGSSIAHVVVPGGEAMWPRALYIVVFSQTESECLPCILPLPLVPLDRIQQGGSCVCFLRIHEFELDKSQFDERTENGLYSDFYLHGARQAEAPQREGGEGMGDAYAKRVLLTAAGDTGTALGLGPRLGTLKNAKFTEWQTNAARFPGVGSEPTSLSGYSGPVTKERLQQYNAKAGD

SEQ ID NO: 82566 - protein, 158 aa, Zea mays
  Coding DNA Sequence Number=SeqID_40787
  Homolog annotation: Hit_ID=Q653F6; Match level="QueryCoverage=41%, HitCoverage=14%, E-value=3e-23, Identity=87%"; Hit description =Putative t-complex protein 1 theta chain
VSLTFLNKCPVVSVSAEHRNIQTANAQLWVWGQDWGCSKMPNSQSGRQMQLAFQALAQSPWYATSSGPLCRTAHTGWLHQPISDNLGLYSILQIETFYVLAVSLKKICNVLLQQLVLGSCEVFEEKQVGNERFNIFSGCPSGQTMTIVLRGGADQVFY

SEQ ID NO: 82567 - protein, 97 aa, Zea mays
  Coding DNA Sequence Number=SeqID_40788
MVRADAAAINLDRRLHQLLNEHEESESRADHATAIPVQEWGQRRKGYFAQGHVPSFSMSWDIESDDEDLDDEVDDGAEDEDLCLYYTESFYKEWEFM

SEQ ID NO: 82568 - protein, 168 aa, Zea mays
  Coding DNA Sequence Number=SeqID_40789
  Subcellular localization annotation: CTP_CleavageSite=56; ConfidenceScore=5.18e-01
MPNSQSGRQMQLAFRALAQSPRYATSSRPLCRTAHTGWLHQKSKREGYFAQGHVPSFSMSWDIESDDEDLDDEVDDGAEDEDLCLYYTESFYKEWEFMANISGPCRFISNTQDGSCDTRHTEIQYLTLGTGLKSGSSCSVVRPEEIPKVLEISGKSSLIDNFFFSYHV

SEQ ID NO: 82569 - protein, 176 aa, Zea mays
  Coding DNA Sequence Number=SeqID_40790
MANSSAPVRVKAITLGSIIKFDYFNFLATANGKLCLDEPKATDVECTGPECPTEGRVARQHSERRHAAPGRCSHRTMGNAEEEETPLSGGTAGGNRHRAPDNKHQHKDHERPRKGISPPWSSQEPSAHYEMILCHSGAVDPSRSLTNMSRVTNKIFTVITELPMPPSRLGDANHQE

SEQ ID NO: 82570 - protein, 281 aa, Zea mays
  Coding DNA Sequence Number=SeqID_40791
MEINRDRFCLSGMLKCCAQEVDLHGDEVADEVMMLSSMDASLVIPPILAHICYAFDFALKTGCDTDPVPDIQAEDEAFCQFETQGTAVAAADDDDDDDDDDFGIPPPPHVPPRSHDHEAGSSSAAPPAIDPALATILQSLTQQQAHLAAEQARQAKVQQQMSERMLSMFQTIQDHQDTLQQRLLADRAEHQAFMTHILQHTRQMDSDCSLSGVPTAKRLAVRTSRWGISGAPDCPNLINASESHIEHTPHALGFSWSSESLRLVTLGDRHHLDDLVALGAR

SEQ ID NO: 82571 - protein, 127 aa, Zea mays
  Coding DNA Sequence Number=SeqID_40792
MAPEAGLGCCQPHSVEWHSSRSGAGGAVLLSDRSVERRSDYGHFGSFDWGACVRIKVSGHLCIKCPLRFGRLAWRFVQGCFLAKTGPRASRRPHRYWSMGTSALRAERESQLMGKVCNLCRGMKLIY

SEQ ID NO: 82572 - protein, 122 aa, Zea mays
  Coding DNA Sequence Number=SeqID_40793
MAPEAGLGCCQPHSVEWHSSRSGAGGAVLLSDRSVERRSDYGHFGSFDWGACVRIKVSGHLCIKCPCDLVGWRGDLSKVASWRRPGLGRAEGHIGIGQWGLALSGQKGNHNSWVKCATSVEE

SEQ ID NO: 82573 - protein, 49 aa, Zea mays
  Coding DNA Sequence Number=SeqID_40794
MVAARRSCAGAVGTWASLLEWSSARGTAPCAMERGELGVTPMESRRFRL

SEQ ID NO: 82574 - protein, 133 aa, Zea mays
  Coding DNA Sequence Number=SeqID_40795
MGKSKKGGGSSHHSGDKRKREPTPPSEDFGDSKEEFSSESEGSPAPASCDTPCASSSYPWRPHLLLSMGVTPSSPLSMAQGAVPLAELHSSRDAQVPTAPAQLLLAATMAAPYAVQGAGELRSPLLSPSQIGP

SEQ ID NO: 82575 - protein, 1714 aa, Zea mays
  Coding DNA Sequence Number=SeqID_40796
  Gene Ontology: Mol. function=helicase activity; Biological process =viral genome replication
  Homolog annotation: Hit_ID=Q1EPC6; Match level="QueryCoverage=90%, HitCoverage=99%, E-value=0.0, Identity=71%"; Hit description=DNA helicase homolog, putative
  Pfam annotation: Domain name=DUF889; Domain location=1348-1584; Score= 459.4; E_value=4.5e-135; Accession=PF05970.5; Description=Eukaryotic protein of unknown function (DUF889)
MSAEQRNEYNNKRRQMRQRNKGQNVMPAISGDGDKKVNVDPDDDSDWLHRNETFQSNDYVATIDLLPPGSVHESVGTIGESGIGVREYRLERLRLYNQTPKRKEAKIEYMRKRRVLQADTLNVVSIAMEDPTYTPEVVHPATEPSTVTACDWVIPEFVRTPFLPAQTQTEDVGSFDMSTEAIKRKHHVPRGERQAILARRNQQFQASIARNVTTLNGDTIGDANNNDDDDEAVIFGEDDDDDERYIFAGQYEETDEDIKIDGTQDESTGTDVPDPYDKVYSNLPEETHMLKPVPDCGYCTAKKFEYEPPGFCCRGGKVELAPLDTPPQLRRLWDSADSDAKHFRDNIRFFNGHFSFTSLYCCLDSMTTNVRDSGIYTFRAQGMMYHNIKSFGKEGGSEHKHLELYFYDDDPSLEHRYRKCREEQLQKDKEVIKQIVGILHGNPYSEHLRSMGHVENLDDYHIALNLDQTLNQKTYNTPLTSEVAAVWIEGSERRGQFSKSVMLHGKDRSSHGIRSYHGCYDALSYPLFFPRGELGWHANIPKVGVSMDEVDAYRATHRANNSNDEDAESPTHLCVSVRDYYCYKFQIRPGVFNPILHGKRLFQQFAVDTYIKIESSRLDFIRKNQDRLRADLYQGLVDSMLDGDIRAEKVGKRTVLSTSFIGGPRDMKRRYMDAMALVRKFGKPDIFLTMTCNPNWDEIRRELLPGQTPQDRPDLVVRVFHAKLQELKHRLTKHDILGKVRAYVYVVEFQKRGLPHAHFLLIMQRKYKLTCPEQYDLLISAEIPHNKYPELRKMVIKHMMHGPCGSLNPNCPCTKGHASCKNHYPQPFSDTTLQGKDSYPIYRRRDDGRKEKVRGCELDNRWVVPYNPYLLRLFNCHINVEACGSIKAVKYLFKYIYKGHDRASVVMRDASKADDDVDEIKQYRDARWVTPPEALWRIYGFELSQNSPPVMQLQLHLPNMHMVAFHERQMVERVVNRPGADRSMLTAYFEANRLHEGARGILYRDFPEWYTWQSGKGKVWQRRKRDTGGQVGRIVSAHPAEGERYYLRVLLNHVTCATSYVDLRTVDGVTLPTFREAAERRGLLESDNTLDECLTERALFQMPSALRRLFATILVYCEPSDVAVLWQRHLDAMSEDYQHRSQSKTHVEQMVLIDIRNMLQSMGKDIKTFPLPPIIDTYDDAIGTAREVYEEESIEPGVGDVALKDSLNKEQGAAYDKILSAVDTDQGGLFFVDGPGGTGKTYLYRVLLATLRSQGKIAVATATSGVAASIMPGGRTAHSRFKIPLTIDDGAVCSFTKQSGTAELLRKASLIIWDEASMTKRQAVEALDNSMRDIMGRPELPFGGKTIVFGGDFRQVLPVVRKGSRAQVVASSLRMSYLWESMSHLKLVSNMRAKNDPWFAEYLLRVGNGTEDTNSDGDICLPDEVCVPYSGSDSDLDNLIDFVFPNLNENMSDSTYITSRAILSTRNDWVDMINAKMIERFQGEHMVYHSFDSAMDDPHNYYPPEFLNTLTPNGLPPHVLKLKIGCPVILLRNIDPANGLCNGTRLVVRGFQRNSIDAEIVLGQHAGKRIFLPRIPLCPSDEEMFPFQFKRKQFPVRLSFAMTVNKAQGQTIPNVGVYLPEPVFSHGQLYVALSRATARSNIKILAIPAVDVKKRSRKGVKKNPTIDCGTCTKNIVYKEKTLGKFDDLKAGVLGPITRHGLGVGVVTISFAVQV

SEQ ID NO: 82576 - protein, 1677 aa, Zea mays
  Coding DNA Sequence Number=SeqID_40797
  Gene Ontology: Mol. function=helicase activity; Biological process =viral genome replication
  Homolog annotation: Hit_ID=Q1EPC6; Match level="QueryCoverage=92%, HitCoverage=99%, E-value=0.0, Identity=71%"; Hit description=DNA helicase homolog, putative
  Pfam annotation: Domain name=DUF889; Domain location=1311-1547; Score= 459.4; E_value=4.5e-135; Accession=PF05970.5; Description=Eukaryotic protein of unknown function (DUF889)
MSAEQRNEYNNKRRQMRQRNKGQNVMPAISGGSVHESVGTIGESGIGVREYRLERLRLYNQTPKRKEAKIEYMRKRRVLQADTLNVVSIAMEDPTYTPEVVHPATEPSTVTACDWVIPEFVRTPFLPAQTQTEDVGSFDMSTEAIKRKHHVPRGERQAILARRNQQFQASIARNVTTLNGDTIGDANNNDDDDEAVIFGEDDDDDERYIFAGQYEETDEDIKIDGTQDESTGTDVPDPYDKVYSNLPEETHMLKPVPDCGYCTAKKFEYEPPGFCCRGGKVELAPLDTPPQLRRLWDSADSDAKHFRDNIRFFNGHFSFTSLYCCLDSMTTNVRDSGIYTFRAQGMMYHNIKSFGKEGGSEHKHLELYFYDDDPSLEHRYRKCREEQLQKDKEVIKQIVGILHGNPYSEHLRSMGHVENLDDYHIALNLDQTLNQKTYNTPLTSEVAAVWIEGSERRGQFSKSVMLHGKDRSSHGIRSYHGCYDALSYPLFFPRGELGWHANIPKVGVSMDEVDAYRATHRANNSNDEDAESPTHLCVSVRDYYCYKFQIRPGVFNPILHGKRLFQQFAVDTYIKIESSRLDFIRKNQDRLRADLYQGLVDSMLDGDIRAEKVGKRTVLSTSFIGGPRDMKRRYMDAMALVRKFGKPDIFLTMTCNPNWDEIRRELLPGQTPQDRPDLVVRVFHAKLQELKHRLTKHDILGKVRAYVYVVEFQKRGLPHAHFLLIMQRKYKLTCPEQYDLLISAEIPHNKYPELRKMVIKHMMHGPCGSLNPNCPCTKGHASCKNHYPQPFSDTTLQGKDSYPIYRRRDDGRKEKVRGCELDNRWVVPYNPYLLRLFNCHINVEACGSIKAVKYLFKYIYKGHDRASVVMRDASKADDDVDEIKQYRDARWVTPPEALWRIYGFELSQNSPPVMQLQLHLPNMHMVAFHERQMVERVVNRPGADRSMLTAYFEANRLHEGARGILYRDFPEWYTWQSGKGKVWQRRKRDTGGQVGRIVSAHPAEGERYYLRVLLNHVTCATSYVDLRTVDGVTLPTFREAAERRGLLESDNTLDECLTERALFQMPSALRRLFATILVYCEPSDVAVLWQRHLDAMSEDYQHRSQSKTHVEQMVLIDIRNMLQSMGKDIKTFPLPPIIDTYDDAIGTAREVYEEESIEPGVGDVALKDSLNKEQGAAYDKILSAVDTDQGGLFFVDGPGGTGKTYLYRVLLATLRSQGKIAVATATSGVAASIMPGGRTAHSRFKIPLTIDDGAVCSFTKQSGTAELLRKASLIIWDEASMTKRQAVEALDNSMRDIMGRPELPFGGKTIVFGGDFRQVLPVVRKGSRAQVVASSLRMSYLWESMSHLKLVSNMRAKNDPWFAEYLLRVGNGTEDTNSDGDICLPDEVCVPYSGSDSDLDNLIDFVFPNLNENMSDSTYITSRAILSTRNDWVDMINAKMIERFQGEHMVYHSFDSAMDDPHNYYPPEFLNTLTPNGLPPHVLKLKIGCPVILLRNIDPANGLCNGTRLVVRGFQRNSIDAEIVLGQHAGKRIFLPRIPLCPSDEEMFPFQFKRKQFPVRLSFAMTVNKAQGQTIPNVGVYLPEPVFSHGQLYVALSRATARSNIKILAIPAVDVKKRSRKGVKKNPTIDCGTCTKNIVYKEKTLGKFDDLKAGVLGPITRHGLGVRVVTISFAVQV

SEQ ID NO: 82577 - protein, 86 aa, Zea mays
  Coding DNA Sequence Number=SeqID_40798
MAPEAGLGCCQPHSVEWHNSRSGAGGVVFLSGWSRRRPPPPALVARAAPTTSDADPHTDVTAVTSPTSLTTPPELYCRRELNKCIT

SEQ ID NO: 82578 - protein, 148 aa, Zea mays
  Coding DNA Sequence Number=SeqID_40799
MSQREALATELRAKLSALDKILEEQRIQQTTTVERLQKLQQELEGKASDAAFAEEKLKAKEQSLEKHLHVFDAPRPRQSTPGARPRVPCAVPSQARATARARAYKASRGFNRTPPLALDLAGAQDRRRLPCTQCASGRPSTHHRRPAN

SEQ ID NO: 82579 - protein, 172 aa, Zea mays
  Coding DNA Sequence Number=SeqID_40800
MGKPIPSLLMLLLSRAFYIFCQVNTFPLVTQCSIMDQAVSLVARSRRFEWSFYPCKKFEAEFNPDTTCAKFTKVNPRVRGTSWGANESTRVRNRRITHRGARSTFAGGRMKSGDLDPVSPARQSLIPRSESFTEARRVSLEGQTGRGMAQLAGLRRWVLGRPLARCAPGKRR

SEQ ID NO: 82580 - protein, 81 aa, Zea mays
  Coding DNA Sequence Number=SeqID_40801
MGQQAVRVLNPDRSGRTTILIVARYTLNTQFRNLRSNLAQLVKGDDAISPDGQTDMSLCGAVGTPPGERAKRGSLTYVQCI

SEQ ID NO: 82581 - protein, 246 aa, Zea mays
  Coding DNA Sequence Number=SeqID_40802
MPLAPPQCIPAVGGDPDGDNNDNASGSSSYNTELSKEQELEGWIARPITRDAARGCHLHDALDTLLRRAFDRHTWSIEYRCVVYQHRRGLYSNQWEATCLRPSQSIILSLRDTTEAAMQDAARRALLQYCSLFSGVADGLDLKYYPLRSTSSAGGVIVSPIGEGNPRLNSMVNLVFVLNTELDHTLDELGKVRAKVAELRVERVACHYEDGGSPAPIGIQHPYCLLPHGRFDYGTPDYRTQIDLEP

SEQ ID NO: 82582 - protein, 149 aa, Zea mays
  Coding DNA Sequence Number=SeqID_40803
  Homolog annotation: Hit_ID=Q6QP51; Match level="QueryCoverage=31%, HitCoverage=21%, E-value=3e-11, Identity=70%"; Hit description =Putative growth-regulating factor 1
MQPGCLMKILEAERWLKGTNFREVAFLQRRQGGRTVGAPHPGARKDRRHLWQAKQATLRLRHDDRVKKGTGKGDTPKGILLREGSGPRAPLLIRGSKARPLEGFNSRLRALGLRAHYWSEVRRPAPRKRSTAASGHSGSAPTTDQGFVG

SEQ ID NO: 82583 - protein, 431 aa, Zea mays
  Coding DNA Sequence Number=SeqID_40804
MGSARVAFVLSSLEERNFAEVGNPAASPRRWSPKTVTTSLMVGRSESGCDLCPALNFKDLHHPGWGGGRAEPELYLLHGFVGHPLLQHSGERALTGLAEGADFDNAGLLPVPPSTAGRSAAICPSYGWLSRRAHRGTAQDVALLGRCSCSWAVLPLLRYDAPTRRSVFARPGGPKWGFAGGQTDAVVGAEVVAAEEVLVADETTATIRAPGLQLFGFDSLSSPLEWGRGRGARRSSVHPEVIAAAVWPPGAEVVVAAAGAGVGEPPGVLSPRRPSNESLGSVGLAARGFSCLVKETPGRSAMSRSRRQRCQHGQRQSWLEKKLHRPEPGRAVHWRDRRRSRVAEATSRSDVLRGQLAEATKRPAEPSARAGFLEETPATMAMRGADRLLRGGDPSTVSSSEAGSDSAEGGVAAEGAAAPPLMSVPAGTVYL

SEQ ID NO: 82584 - protein, 144 aa, Zea mays
  Coding DNA Sequence Number=SeqID_40805
MRMRAVDAAECYPFVGGCCSEGEGELPPRFPQMDRKPLPRWWKHELAAGQAQLLAGAKGGEAAAAGCRGGGLRKGTKRKGSHSSSTGERARKRRRVRSFLTNKVWLCFMAACALAWWAGRFYTFRVSHKHIVLNNQQCARNLVL

SEQ ID NO: 82585 - protein, 139 aa, Zea mays
  Coding DNA Sequence Number=SeqID_40806
MAKPAAAEPFSIRGYAMRMRAVDAAECYPFVGGCCSEGEGELPPRFPQMDPKPLPRWWKHELAAGQAQLLAGAKGGEAAAAGYRGGGLRKGTKRKAGGGGGREGMGADLSGVSGGHGGGGGGTVYNWLLIVVEVVLLPL

SEQ ID NO: 82586 - protein, 77 aa, Zea mays
  Coding DNA Sequence Number=SeqID_40807
MYEALENKSPTGRITVQCMSALYRLQALQSDAMAHLTNLAQTTKITLESREDFVVDLSSELVEKDLQVEQLSLTMRA

SEQ ID NO: 82587 - protein, 117 aa, Zea mays
  Coding DNA Sequence Number=SeqID_40808
MNVCELTLVVSHPPHVKNRADDTTEAATMKTLMTFCGYHPLEMVMHPLGLFPAEKRDDPMWCNRVSHMKDVWDMHLDKIGRITVQCMSALYRLQALQNNAMAHLTNLAQTTKITLDS

SEQ ID NO: 82588 - protein, 52 aa, Zea mays
  Coding DNA Sequence Number=SeqID_40809
MARVRGDCLGRVVPVLCSSQGYYTKVVELYLRNNFGNVNMVCCCVKIGEKVG

SEQ ID NO: 82589 - protein, 167 aa, Zea mays
  Coding DNA Sequence Number=SeqID_40810
MARVRGDCLGRVVPVPCSSQGCYTKVVELYLRNNFGNVSLFYELNYSRMPSLEFSCDWFVGFWIKVSIANLETIVKRFWVLVVINPRRIGIGKMDFPCVCSTLMHPNACCISINIHDHVIHIELLPEGMKIQAEVVTEEESTLVAADQVEEPSNWGLIEGSSTSSLQ

SEQ ID NO: 82590 - protein, 379 aa, Zea mays
  Coding DNA Sequence Number=SeqID_40811
  Gene Ontology: Mol. function=transporter activity; Cellular component= nucleus; Biological process=regulation of progression through cell cycle
  Homolog annotation: Hit_ID=P93646; Match level="QueryCoverage=46%, HitCoverage=33%, E-value=1e-69, Identity=78%"; Hit description =Cyclin type B-like
  Pfam annotation: Domain name=Cyclin_C; Domain location=97-210; Score =86.6; E_value=7.6e-23; Accession=PF02984.9; Description=Cyclin, C -terminal domain
  Pfam annotation: Domain name=Cyclin_N; Domain location=1-95; Score =46.4; E_value=9.9e-11; Accession=PF00134.13; Description=Cyclin, N -terminal domain
  Pfam annotation: Domain name=Mito_carr; Domain location=227-306; Score=38.3; E_value=2.7e-08; Accession=PF00153.17; Description =Mitochondrial carrier protein
  Pfam module annotation: Pfam domain module=Cyclin_C::Cyclin_N::Mito _carr; Domain location=97-210::1-95::227-306
MPETLYLTVYIIDQYLSMESVPRKELQFVGISAMLIASKYEEIWAPLSILRLAYTTSSDILQVKDLMCLCDNAFTRDQVLTKEKAILDRLHWNLTVPTMYMFIVRYLKAAMCDTELENMAFFYSELALVHYSMLVYPPSVTAAAAVYAARSTLGMNPPWTDILEHHTGLAEPQLLLWQTLERRMGLRVTGKETFYTCLMFPIIHCLSCCAVQIPIHLPLTCPGHSHNSLQCSATLPVTYPLDVLQLRLAVQSGHNTLSQVALNMLREEGLASFYGGLGPSLVAIAPYIAVNFCVFDLMKKSVPEKYKNRPETSLATALLSATFATLMCYPLDTVRRQMQMKGTPYNTVFDAIPATSQADYSWDYPHTKVTNWLAVEAQR

SEQ ID NO: 82591 - protein, 463 aa, Zea mays
  Coding DNA Sequence Number=SeqID_40812
  Gene Ontology: Mol. function=protein binding; Cellular component =nucleus; Biological process=regulation of progression through cell cycle
  Homolog annotation: Hit_ID=O24584; Match level="QueryCoverage=77%, HitCoverage=90%, E-value=1e-173, Identity=78%"; Hit description =Cyclin type B-like
  Pfam annotation: Domain name=Cyclin_C; Domain location=320-432; Score= 107.0; E_value=5.6e-29; Accession=PF02984.9; Description=Cyclin, C -terminal domain
  Pfam annotation: Domain name=Cyclin_N; Domain location=246-318; Score= 18.6; E_value=3.5e-06; Accession=PF00134.13; Description=Cyclin, N -terminal domain
  Pfam module annotation: Pfam domain module=Cyclin_C::Cyclin_N; Domain location=320-432::246-318
AATSRMAAASRPRYPAAAHLAGAGLLAPSSDNGEAKGGGGRTPGGGAARAPRAAYGNDAGEELTQCAPMSFSFRLVRKPMDTFPQPAAARGRRALVDVGNLMNGRPSLVNHQKQAVAAAATSHKPLNVGNKKPLVPQAAARGMRPLADVTNLMINDRAAPANRQKPLDAVFNRNGKAVKLKECKVKPEVIVTIPDSEKEKKGKLPGGQRVCRRASDGITTPKKKDPYDIDAPDSCNELAVVEYVEDIYRFYKSTEGTCRPLSSYMSSQAEISERMRAILIDWIIEVKDLMCLCDNAFTRDQVLTKEKAILDRLHWNLTVPTMYMFIVRYLKAAMCDTELENMAFFYSELALVHYAMLVYPPSVTAAAAVYAARSNLLVAEDDAFNRNHRECARRLISFHTLAPESKQKAVYRKYSKPKLGSVALQSPVKKLLSVKQHKVDPNSGSQVFLKAIQYMGRTLKCPE

SEQ ID NO: 82592 - protein, 182 aa, Zea mays
  Coding DNA Sequence Number=SeqID_40813
  Subcellular localization annotation: CTP_CleavageSite=36; ConfidenceScore=5.11e-01
MVDVFTAFGFVNLCLAFTFLQISTFPDPQLAADSTMASAEAPLPSAAVLFLAAVPVAGAGNGRRRSISGLLIFVLCVSAGTLELIVFGKAAVGGTAEARALGLPDLPALPAAATATFFSGMTLVIVAAHRRAGGEDEGGGGGAVAGDGRPTQGLLRLTAGAAAAALVGLMAMPLIVILYGAK

SEQ ID NO: 82593 - protein, 240 aa, Zea mays
  Coding DNA Sequence Number=SeqID_40814
MEAFLEKKTRGEESMDRCIRIFEAMEDLTDEEKAIAAELRQPVSLAALTFLDPQPAAGSTMASAEAPLLHIAAEVLPLLASAAVLFLAVAITYGHLTVMGRHVAAVPVAGAGNARRSVSGLLIFVLCVSAGTLELIVFGTTKAAGGGAADHGAQARALGLPDDPPALLAAATGTFFSGMTLIIVAHRRAGGGEGGGGGAVVAGDGPIQELLRLLITKVAAGAAAALVGLMVMALTLYRAK

SEQ ID NO: 82594 - protein, 153 aa, Zea mays
  Coding DNA Sequence Number=SeqID_40815
  Gene Ontology: Mol. function=protein serine/threonine kinase activity; Cellular component=cytoplasm; Biological process=protein amino acid phosphorylation
  Homolog annotation: Hit_ID=P29618; Match level="QueryCoverage=52%, HitCoverage=27%, E-value=3e-38, Identity=88%"; Hit description=Cell division control protein 2 homolog 1
MSVAIPLEQSITPVLQDFMNLNIFYLPVYYCGGLRGSTIDEASPSPPASSPSKKSGEQDYCLTMAVNEGMNEIDVWSVGCIFAEMVNQKPLFPGDSEIDELFKIFRVLGTPNEQSWPGVSCLPDFKTAFPRWQSQDLATIVPNLEPAGLDLLS

SEQ ID NO: 82595 - protein, 305 aa, Zea mays
  Coding DNA Sequence Number=SeqID_40816
  Homolog annotation: Hit_ID=Q6J9W0; Match level="QueryCoverage=23%, HitCoverage=18%, E-value=3e-30, Identity=92%"; Hit description =Putative RNA-binding protein
MATVALASIEGFNCAANRTYPCQAYVLYRAGFAGVPLDLAAIGDLFAFGCPSRSPSSYTPMQYQIGPADTYWIVSTTKLQNLTQYQAVEHVNPTLVPTDLDVGTMVTFPVFCQCPAATDNVSALVTYVMQPGDTYASVCRRLLRRLSTVKDTMRRSPVHALRLSALLTTGICLFAECQILYRVPDWFLDRNDYKDNRFSQVISNALGMKLRDNLNKLKKIQSSLCRKDAPSPRCAPRPLPTLVVVMEGAVTSQRMSVAIPLEQSITPVLQDFMNLNIFYLPVYYCGEFYDLRYSLVVDSHVHETT

SEQ ID NO: 82596 - protein, 591 aa, Zea mays
  Coding DNA Sequence Number=SeqID_40817
  Gene Ontology: Mol. function=cysteine-type peptidase activity; Biological process=proteolysis
  Homolog annotation: Hit_ID=Q109R5; Match level="QueryCoverage=73%, HitCoverage=37%, E-value=2e-30, Identity=24%"; Hit description=Ulp1 protease family, C-terminal catalytic domain containing protein
  Pfam annotation: Domain name=Peptidase_C48; Domain location=15-215; Score=12.2; E_value=7e-05; Accession=PF02902.9; Description=Ulp1 protease family, C-terminal catalytic domain
MESLFVGLSHNKPKKSVATAIVREVLSHDWLLLDYICTQGDLALINFIKEIPCEPRVEVVLIDDAFVERKWMECLFQPSAYLGDEVFIPINIRETHWYLAVIHARNMEIQVLDSLGTSQDRKDLTDSIKGLQRQIDMISQRKELKDHRWPDLQVASWPLREIDMGYAKQTDSSSCGLFLLNYIEYWTGDELSDSFTQDDMSHFRKKMAVILLSSDLNKRRGCLLYKNEKELDSGSPSDVEILENPTDSNKRKLLHVLDDSEVVFEDEEGPITQADLQRWFVDNWDKRAPVKVSNDGCTNDFLMVGLSTKNMPVTKADSIDVLCDYIMAIEDDTTLERTWVRSFNPFKIEISVKDLQNILTTTQDMILRCFDMAVRLLANKESRKPKEEIINNRKHYMDMRFWRMVGFGKIPKYHQDPTTEELAKTLDCWPSMNYYITGCRYVLMPWKFNGCHALFVIDHVKKHVTFIDFTPTQDWCKHMPYKRFAEAIIMASKKYKIAYSKKRSGWAEDIFKWEHTIQTGVPIDLRGFNTSYLVLQAMAMWGNDRRLKFVGDAKTLRRNFVIDLLSYEDNSCRYAIPANIQQRLVDIAKKD

SEQ ID NO: 82597 - protein, 160 aa, Zea mays
  Coding DNA Sequence Number=SeqID_40818
MEDEEESGLEDEEEATVTLSMEKDALECDICCLPFQSEVFMASQITMHDEEESGLEDEEEATVTLSMEKDALECDICCLPFQSEVFMASQITMHDEEESGLEDEEEATVTLSMEKDALECDICCLPFQSEVFMASQITMHLMMLILFQSVINFGTEFEYI

SEQ ID NO: 82598 - protein, 80 aa, Zea mays
  Coding DNA Sequence Number=SeqID_40819
MEDEEESGLEDEEEATVTLSMEKDALECDIYWLPTLPVRSFHGKSDYHACFELFSTSATIMDVLFKITINPTTLSHDPKP

SEQ ID NO: 82599 - protein, 352 aa, Zea mays
  Coding DNA Sequence Number=SeqID_40820
MGFTRYEGGYRMISLPAVMLMGKTSTRWVDRYEYGLVVPNPSTHVSEGEASCRRDNTVRCLARAHCLPALDDLDAAFQRMGRDTLNAKRARRPSAQWQVFDFSTAGSGEDEGAFNRVAVACSFVRRFTFLTAGCPENKGARNCGTVAHSLRGGSPSSRFRGAQPRGGWCSSTIAWLQEFSSCSPAAVPRQWSSRRMTTSLVVGRSKLGCDLPPALSFKDVHHPCWGGRRAESGSFLLHGPMTCFFLQHSGETTFTGLAEGANFGYTGPAGCKRCQLPRAWLLGSDGPRAASDAASCRLVGAWLFVHRTFDSRAVRGSATSMASPAPLAVLGVDFSLGSQVVCSDPLDGGFKY

SEQ ID NO: 82600 - protein, 237 aa, Zea mays
  Coding DNA Sequence Number=SeqID_40821
  Subcellular localization annotation: CTP_CleavageSite=42; ConfidenceScore=5.42e-01
MAPFPNGCERQRASPMATNALPQRLRTPTRFPNGGSRPNGARAHAAFYDASANGARARAHPAFNAGSRPKSSPAFNAGSRTPNSSPPNAPFPKPLPVPLWRPILAEGVAHGGGEEPLRGEARRPRQQAQMSRPVRQSVALHFQRYGDLTRDGNGYPKPEYPTGFTRYEGGYGMISLPAGMLMGKNLYPLGRRVVEALPAEDNSIDVVISTLVFCSVNNIDMALRDRSNHTKMYGVSF

SEQ ID NO: 82601 - protein, 97 aa, Zea mays
  Coding DNA Sequence Number=SeqID_40822
MAENKEESEVTKEKTPPPWESQVGTWLYFDICGSEPDSPINEGKPRLDDRGPFNWSHASSWVRKRQIFVAFAPRWFPRKKNKSEAAGGLGPPYRTFV

SEQ ID NO: 82602 - protein, 97 aa, Zea mays
  Coding DNA Sequence Number=SeqID_40823
MAENEEESEVTEEKTPPPWESQAGTWLYFDICGSEPDSPINEGKPRLDDRGPFNWSHASSWVRKRQIFVAFAPRWFPRKKNKSEAAGGLGPPYRTFV

SEQ ID NO: 82603 - protein, 597 aa, Zea mays
  Coding DNA Sequence Number=SeqID_40824
  Gene Ontology: Mol. function=binding; Cellular component =intracellular; Biological process=protein kinase C activation
  Homolog annotation: Hit_ID=Q5Z8I7; Match level="QueryCoverage=95%, HitCoverage=87%, E-value=0.0, Identity=72%"; Hit description =Selenium-binding protein-like
  Pfam annotation: Domain name=PPR; Domain location=127-161; Score =16.9; E_value=0.075; Accession=PF01535.11; Description=PPR repeat
  Pfam annotation: Domain name=PPR; Domain location=189-223; Score =31.6; E_value=2.8e-06; Accession=PF01535.11; Description=PPR repeat
  Pfam annotation: Domain name=PPR; Domain location=224-258; Score=6.7; E_value=1.2; Accession=PF01535.11; Description=PPR repeat
  Pfam annotation: Domain name=PPR; Domain location=290-324; Score =21.7; E_value=0.0026; Accession=PF01535.11; Description=PPR repeat
  Pfam annotation: Domain name=PPR; Domain location=326-360; Score =11.4; E_value=0.34; Accession=PF01535.11; Description=PPR repeat
  Pfam annotation: Domain name=PPR; Domain location=362-396; Score=6.3; E_value=1.3; Accession=PF01535.11; Description=PPR repeat
  Pfam annotation: Domain name=PPR; Domain location=428-462; Score=9.9; E_value=0.51; Accession=PF01535.11; Description=PPR repeat
  Pfam module annotation: Pfam domain module=PPR::PPR::PPR::PPR::PPR::PP R::PPR; Domain location=127-161::189-223::224-258::290-324::326 -360::362-396::428-462
  Subcellular localization annotation: CTP_CleavageSite=79; ConfidenceScore=5.71e-01
MASLSASTSRRRSTRSSFPACSAASPRSLARPWGAPLRYAVAVFSSLSPPDPFLAAALLRFAHLTQPPLETFRLFSRLRCAHGSDLPFLPFAFSPLAKSAAAARSLHAAASAHAVSLLLGGFDKHRFVENSLISAYVACGDVGAARKVFDEMLVKDVISWTSIVVAYSRIRDMGSAEEVFALCPVKDMVAWTAMVTGYAQNAMPVKALEAFEQMAVAGMPIDEVSLTGAISACAQLGAVKRAAWVQEIAERNGLGRNVVVGSGLVDMYAKCGLIDEARKVFEGMHDKNVYTYSSMIVGLASHGRANDVIALFNDMVRRADVEPNHVTFIGVLTACSHAGMVKEGRYYFAQMKDRYGILPSADHYACMVDLLARSGLVTEALDLVKSMTVEPHGGVWGALLGACRIHGNTEVAKIAAEHLFRLEPEGIGNYVLLSNTLASAGEWDEVSKLRKLMRIRGLKKDPAVSWFEGRDGFVHQFFAGDNTHPSMHEIKKRLLELREKLNLAGYVPILSSVVYNVSEEEKERLLMGHSEKLALSFGLLTLESRSSIRIVKNLRICEDCHLFIRLVSKVEPIEILVRDNMRFHHFRDGECSCGGFW

SEQ ID NO: 82604 - protein, 659 aa, Zea mays
  Coding DNA Sequence Number=SeqID_40825
  Gene Ontology: Mol. function=binding; Cellular component =intracellular; Biological process=protein kinase C activation
  Homolog annotation: Hit_ID=Q5Z8I7; Match level="QueryCoverage=80%, HitCoverage=82%, E-value=0.0, Identity=76%"; Hit description =Selenium-binding protein-like
  Pfam annotation: Domain name=PPR; Domain location=189-223; Score =16.9; E_value=0.075; Accession=PF01535.11; Description=PPR repeat
  Pfam annotation: Domain name=PPR; Domain location=251-285; Score =31.6; E_value=2.8e-06; Accession=PF01535.11; Description=PPR repeat
  Pfam annotation: Domain name=PPR; Domain location=286-320; Score=6.7; E_value=1.2; Accession=PF01535.11; Description=PPR repeat
  Pfam annotation: Domain name=PPR; Domain location=352-386; Score =21.7; E_value=0.0026; Accession=PF01535.11; Description=PPR repeat
  Pfam annotation: Domain name=PPR; Domain location=388-422; Score =11.4; E_value=0.34; Accession=PF01535.11; Description=PPR repeat
  Pfam annotation: Domain name=PPR; Domain location=424-458; Score=6.3; E_value=1.3; Accession=PF01535.11; Description=PPR repeat
  Pfam annotation: Domain name=PPR; Domain location=490-524; Score=9.9; E_value=0.51; Accession=PF01535.11; Description=PPR repeat
  Pfam module annotation: Pfam domain module=PPR::PPR::PPR::PPR::PPR::PP R::PPR; Domain location=189-223::251-285::286-320::352-386::388 -422::424-458::490-524
  Subcellular localization annotation: CTP_CleavageSite=19; ConfidenceScore=5.09e-01
MTPPHRRMVHLAPRHGHPPAQLPAPQLPPTDLPLSLLPPPSLASLLLAAVASSPSFPHLRHLHGLLVRLHLPPPFNPFLLSRLLRRLAALPRPPLGAPLRYAVAVFSSLSPPDPFLAAALLRFAHLTQPPLETFRLFSRLRCAHGSDLPFLPFAFSPLAKSAAAARSLHAAASAHAVSLLLGGFDKHRFVENSLISAYVACGDVGAARKVFDEMLVKDVISWTSIVVAYSRIRDMGSAEEVFALCPVKDMVAWTAMVTGYAQNAMPVKALEAFEQMAVAGMPIDEVSLTGAISACAQLGAVKRAAWVQEIAERNGLGRNVVVGSGLVDMYAKCGLIDEARKVFEGMHDKNVYTYSSMIVGLASHGRANDVIALFNDMVRRADVEPNHVTFIGVLTACSHAGMVKEGRYYFAQMKDRYGILPSADHYACMVDLLARSGLVTEALDLVKSMTVEPHGGVWGALLGACRIHGNTEVAKIAAEHLFRLEPEGIGNYVLLSNTLASAGEWDEVSKLRKLMRIRGLKKDPAVSWFEGRDGFVHQFFAGDNTHPSMHEIKKRLLELREKLNLAGYVPILSSVVYNVSEEEKERLLMGHSEKLALSFGLLTLESRSSIRIVKNLRICEDCHLFIRLVSKVEPIEILVRDNMRFHHFRDGECSCGGFW

SEQ ID NO: 82605 - protein, 97 aa, Zea mays
  Coding DNA Sequence Number=SeqID_40826
MASGAAQIDGDRCILEQGAGVSALTASGQESREHKKENGVRQRQEMVPAPTKGEWRSAMATLKVSRASRGVAMAMEAPAAGGTERGRRANGGGSSLP

SEQ ID NO: 82606 - protein, 156 aa, Zea mays
  Coding DNA Sequence Number=SeqID_40827
  Subcellular localization annotation: CTP_CleavageSite=69; ConfidenceScore=5.38e-01
MAPSSLALAPCRRAAGAPFSSFPAWCAQEQKLLGSTPTPSSSPAPLLLHGSELPPPLARRPLSVPPAAGASMAMATPLDALLTLSVAMADLHSPLVGAGTISWRCLTPFSFLCSLLSWPLAVRALTPAPCSKMQRSPSICAAPDAIVSQHVGAELR

SEQ ID NO: 82607 - protein, 106 aa, Zea mays
  Coding DNA Sequence Number=SeqID_40828
MTSIGAASGAPDTVRCPGQGTNELATLGFSGRRFAIIHRTVRYAPDSVRLTLCFLCNLNCKGERLQTVEIPRKREKYSKGKDRGVGVWDPTAHPGLPLKVLLGRTV

SEQ ID NO: 82608 - protein, 183 aa, Zea mays
  Coding DNA Sequence Number=SeqID_40829
MDHGKRPTSECSHQVTSLPYRVVGPSIGGEVISLSSSSSSDGESKAGPCDSEPTSSVLSADAIGAPVIAGRPETDVRFIGAGCQPYRVILCPRVATSSSSSPFVSSCEMPNTLIEFLCAKCVKSANQSIRFESCVCCSPNLTLCFLCDLYYKGKRLQTVEIPRKREKYSKGKDRGIQVDHWIA

SEQ ID NO: 82609 - protein, 296 aa, Zea mays
  Coding DNA Sequence Number=SeqID_40830
MDNVYSGPGGYLSPTVFDRSDEDFGSEIFKVEDPVVKDAGGALFDRMWGPHGWEAVRDRADRARDQRLNSALPEAEADPVMAEAEVCPAPLPETGEGSHTAPASTVAGGGSPAATIPMAEDPPKAATEPAAEDPVAAAGSSQDFGPAHATGTANFVVASTVVAGNESDGSTSKFSAFDDSGSSVLWTEESSDEGLDYFAALDVAEAEASPRVTDAEILPGPSVGCRRRRAVAKRRVSGFDDGRFRVGRAGRQELLSSPVGASMGEGELRRLFEAEELRIMLFNYREMGIIPKVEPM

SEQ ID NO: 82610 - protein, 295 aa, Zea mays
  Coding DNA Sequence Number=SeqID_40831
MDNVYSGPGGYLSPTVFDRSDEDFGSEIFKVEDPVVKDAGGALFDRMWGPHGWEAVRDRADRARDQRLNSALPEAEADPVMAEAEVCPAPLPETGEGSHTAPASTVAGGGSPAATIPMAEDPPKAATEPAAEDPVAAAGSSQDFGPAHATGTANFVVASTVVAGNESDGSTSKFSAFDDSGSSVLWTEESSDEGLDYFAALDVAEAEASPRVTDAEILPGPSVGCRRRRAVAKRRVSGFDDGRFRVGRAGRQELLSSPVGASMGEGELRRLFEAEELRIMLFNYREMGIIPKVEP

SEQ ID NO: 82611 - protein, 131 aa, Zea mays
  Coding DNA Sequence Number=SeqID_40832
MASGRTPLQQRPRPRLRSRGEDKLSKPKSRRPGARMVAVIPSGDEDFFSRHHLSTDDGRRLPTGRSPLGSSRTSGAPTSVRRRRTGGKGRTAPEHERRPSSARRLGRSSGARGATTALAVGGGTGGRARAS

SEQ ID NO: 82612 - protein, 215 aa, Zea mays
  Coding DNA Sequence Number=SeqID_40833
MAAENIRTLQDEPILQAQTSMEGEQQHPRRQLHLRRSPTEPRTATRLEGLHSEGRCQDHAWVIAAGVRTTPHVGGPVEQQKADGWLVDARSGSSDNNLRSRWPNSSSDGLRTDAAATRPSPTSPLEGRGQAIKAKESEARSADGGGDPVGDEDFYSRHHLSADDGSHLPTGRSPLGSSRTSAEGTVLGQRQYSPRTRTPPLAAHDVLGGPPVRAA

SEQ ID NO: 82613 - protein, 170 aa, Zea mays
  Coding DNA Sequence Number=SeqID_40834
  Pfam annotation: Domain name=IQ; Domain location=34-54; Score=25.0; E_ value=0.00027; Accession=PF00612.17; Description=IQ calmodulin -binding motif
MQATLQKVEQGMLQIKAAVQHEQHQLAMSTRLRASAAVGIQAAARGFLARQKVREMRRQMLEAALVTVDLGTRRRDLTLSDGHQQWHQAAISKCEHGMCPAGDELQLYDSGSREGTPLVIGKGALFSATTFRYRPPRGRLRWLLLRPTPGPVMLQLEDELLVQEGCSVRA

SEQ ID NO: 82614 - protein, 245 aa, Zea mays
  Coding DNA Sequence Number=SeqID_40835
  Pfam annotation: Domain name=IQ; Domain location=48-68; Score=25.0; E_ value=0.00027; Accession=PF00612.17; Description=IQ calmodulin -binding motif
MGDLWTNIRADLTKMQATLQKVEQGMLQIKAAVQHEQHQLAMSTRLRASAAVGIQAAARGFLARQKVREMRRQMLEAALVTVDLGTRRRDLTLSDGHQQWHQAAISKCEHGMCPAGDELQLYDSGSREGTPLVIGKGALFSATTFRYRPPRGRLRWLLLRPTPGARPCAPLSSRWRPWDPGGCTHASPMRGGCLVLGQVDSVFEDPSCCSSRTSCLSRRGVVSGPKEAHGGAAVAAAMGPLRRIR

SEQ ID NO: 82615 - protein, 98 aa, Zea mays
  Coding DNA Sequence Number=SeqID_40836
MEQSNTGGRPQLRERNQGDPVTNQIRRGHEDTRILPWVPHNDQPRPRHWLVESVGNVGHGGDWNAITPIQAMDAFCVFVRATVGKGREPQGVRVLSPG

SEQ ID NO: 82616 - protein, 98 aa, Zea mays; identical to SEQ ID NO: 82615
  Coding DNA Sequence Number=SeqID_40837

SEQ ID NO: 82617 - protein, 500 aa, Zea mays
  Coding DNA Sequence Number=SeqID_40838
MDKDRQEAAQKRRAVVRLPEARPKRARGTVKAAAPGGSQPTLAVKSAGPGSSKVSDVVKAAGADGTKSTSAEAAKARELPPPGKRIADFGTDISVDDYLTGSGEGQLVVVPPAVATTVSATVPMAKGGALSAGDEITALAAVKDEAGAVSRRLKEASQRLSQAADFADRVASGGPSRQLCLPKSRHFGRNMLRSSGKSRSPIASAANWRRRWPVLEGERTELRRQLAEERREANQALAKAQSAQAEANVARVEGSLARQRAEEWEERFNALQACVERAEASTCSEVERTRKQLMDSYHELGARTADFEVPDRESGLRCLEWLQEELLALPTIVEGFMSYASLVTYEGAMNALSREGCRHYEVFDRSDEDFEREIYKVEDPVVKESAGALFDQMWGPHGREVVRERSDTARGQAVRDEKVDDFGALNSARPEAESNLLAAGPEVAPVPPPKTVKGSPDAPAATAAGGGSSPTAAPTAEDPPKTAAEPAAEDPAVAGSSQVA

SEQ ID NO: 82618 - protein, 270 aa, Zea mays
  Coding DNA Sequence Number=SeqID_40839
MGKTSMEVVELVPCARNKWGNWWDFWFYVAEGTVEDHPGLPVAEMCSHCYSVYPQFEVAEEDADEGALRCTAGLSSGRDLVEEFVAYGVWPLARGWALGEVCPLQMPSRGGMLVRSPAFALDLHSRDLAAFVREAEDGAVRIVGRYVPRTEGQRSWDIRESNDRLNRVFELNRLPYGVDGDMRGPQGKDVFARAPGVFGADAEAGAGGAKSTSAEAAKARELPPTGKCIADFGTDISVDDYLTVPVAKGGALSAGGEISALAAVKDEAGA

SEQ ID NO: 82619 - protein, 52 aa, Zea mays
  Coding DNA Sequence Number=SeqID_40840
MQVMAPPVGLRPPLRWARGPLSVPWIRGTPCYKERFTRLTDSMFIGDAEMRK

SEQ ID NO: 82620 - protein, 250 aa, Zea mays
  Coding DNA Sequence Number=SeqID_40841
MGGANRAPHARGGTTEPPCVGGHAPVCRKDGRDDWELTQEEGYSPTCRLAPSPEVGPGATVGSLKQGPGPTAWKAPDPVHSERTSGTDPGPFQMWLGRFTTESQILGAGNTRTQPWKGSGADTCPGLAPRPPPRRKTPTTTWLVAHDVSQRKESDVGSLESRSDCIYCSRDATPAPSQRKMCPSAFNASSPLRWQMVSDSASVQSIIKQRACAMRQTVLVVPSARKLPQHAKDAQISSVRAWEDCPSNEH

SEQ ID NO: 82621 - protein, 292 aa, Zea mays
  Coding DNA Sequence Number=SeqID_40842
  Homolog annotation: Hit_ID=Q6K1T2; Match level="QueryCoverage=19%, HitCoverage=9%, E-value=7e-09, Identity=73%"; Hit description =Putative lysyl-tRNA synthetase
MTTVYNQCLVILALSTFLHIFWFLVFGVVEPWPGIAWLEEKVKIMGSYALELVFIADINGSASSRVPLLSVVTRRCHGILGLGKVYKTVVRPPVFHKQPHTAAKVLQQLAIEDGVTLVLEFMKGTMYDIWDEFRDQIDHVTTLMGGSMSFSLPVIQIENTSQFSPWIYKQLFPRSRFENQIKQHIDNRAAMAKEIKSTEDEGYDDYSYEVFFRRRLFDFIVMWNATSIRNVETRALDPSAAIEETSSFLELIAIRYHQARRGEQGPPLRLLLRQAAAAEGVGEEGQGRGGGT

SEQ ID NO: 82622 - protein, 333 aa, Zea mays
  Coding DNA Sequence Number=SeqID_40843
  Subcellular localization annotation: CTP_CleavageSite=32; ConfidenceScore=5.11e-01
MVETRRSSAAAAEKRMSPSPSSSFVPSRSAPRAEEDSVAGAAPARSAGSVDDAAAVAQKDQGVDKPSSAAAESSKRRKEQEQQQPAVPWAKLLSECSQIKESISRLPLLQRVQSGGRSRSNSNPQCHGRSCSQSAHRCARQHSKGAFGRSREGKGGRSAAKFEDAAIEASDGTVYFSDASTPAVPPPDNPSGLTTILKGPLKADYCFSHSHLHLMVTLSRTSPDAKGILGLGKVYITVVRPPVFHKQPHTAAKVLQQLAIEDGVMLVLEFMKGTMYDIWDEHAGRSAARFADEVGAATELTQVTSISRRERELLLEAKAADIHQIILLVLPLY

SEQ ID NO: 82623 - protein, 379 aa, Zea mays
  Coding DNA Sequence Number=SeqID_40844
  Homolog annotation: Hit_ID=Q6QP54; Match level="QueryCoverage=23%, HitCoverage=31%, E-value=4e-18, Identity=74%"; Hit description =Putative kinase
MRRKDGGYPPSGGLEDGKTRRIREEEDMVAFRKGPTCHATGSPDAACKQLNRHLRHHRASSVAEPIPRLEAAQRTTQRRQPGATVNAAESGPTVMTVAGGREQRSRRQPDSRPIQGQQESLPSRREDDAPVVRSSNGSRTRNGRPANHSPRRINSAAGQAAPLAGEAGDASPSPDRERGIPRKGSFPVKEPGSEPPLLIRGSKTGPPRGSTVASDRVGPTPTTGQRLAPEGFTVASDAERGMTRGLGLRLSPGRRRTPLRPTPGLGLRSGLCRTTSASPDLGARARPRQWKTDSTLASEEPPRRPASGAGPPRQQGAPSSPYPEPTRAAENKTGGRQQGLDRSDSCPSVKLHCSSDSHGITPAECQDLSGCHIGMYLGR

SEQ ID NO: 82624 - protein, 209 aa, Zea mays
  Coding DNA Sequence Number=SeqID_40845
  Subcellular localization annotation: CTP_CleavageSite=23; ConfidenceScore=5.61e-01
MSSSSRMRRVFPSSKPPDGGPAVSPRRWSPKTVTTSSWVGRSKSGYDLGPTLSFKDVHHPRWGGGRAEPALYLPRGSVDFPLPRRSGERALTGPAGGPDFDNAGPVDGGHRHLQRVGLVGLAPGGPSRRRAAAAPFSPVDYLNRFTKHESPRVKVTSENEQRQSWLENGNLVGRSLAGLSVSGTDAGVDQPRPRTGLAPLEDGWPRPLG

SEQ ID NO: 82625 - protein, 231 aa, Zea mays
  Coding DNA Sequence Number=SeqID_40846
VGGVLREGEEVEGTGRGYIGTTSSGSGGGKWAVDLVTDGQSEVVGHASAGESEDGGAGGGKDRERDWGERRRSVAAAIVEGEHEIGGRGSRLSVRRWNGGAISTYAMALHPRLAPAGEFGAGGERGRPEGREASMASVRRVEEQGRRASRTRDRKGIATIATTKARPPGIEAEAEPCTGLALDPHVQLSLRFSFTLHDFSHYYKVVQSILKAEQQDGGVKYAFGAAAALRT

SEQ ID NO: 82626 - protein, 80 aa, Zea mays
  Coding DNA Sequence Number=SeqID_40847
MALHPRLAPAGEFGAGGERGRPEGGGEHGEEGFDPPEIVAPEEGQEPDLPEIELSCQESFDEGESILPLMHKVPTLSTTT

SEQ ID NO: 82627 - protein, 103 aa, Zea mays
  Coding DNA Sequence Number=SeqID_40848
MGELGRSCATQSWRNRGHGGQGRELREKLGTHGRQGRTRCAGEEIKSSVRWKIRKLEHIIPHGGRGLRVPPPVHAPRETCTACVRKPGTGSYAMEAEVDTWRR

SEQ ID NO: 82628 - protein, 302 aa, Zea mays
  Coding DNA Sequence Number=SeqID_40849
MSGAPATSPKPLGSDRWSSDFWARLDVRWRTGHFPEAGEFLRPLFLGAPDTVREERQTGRVARVLGAQGTWPGDLATINVPRKNSSRQRKCRAQGDAPCRGDSAGRGKRSAGHGNGRTAGRDAGRSGRAGRATAVNNRGTANLREPREMGGLGRSCATQSWRNRGHGGQGRELREKLGSHGRQGRTRCAGEEIKSSVRWKIRTLEHIIPHGGRGLRVPPPVHAPRETCTACVRKPGTGSYAMEAEAFVKMPSPAKGVPARFVSVGPAAAANASSEGWRLCLRPNICPPRDQFDKVTWCRRRR

SEQ ID NO: 82629 - protein, 187 aa, Zea mays
  Coding DNA Sequence Number=SeqID_40850
  Subcellular localization annotation: CTP_CleavageSite=38; ConfidenceScore=5.30e-01
MTPIAVDPRVSFQGPLVTTHGPPLRLSRRRIEVGPRRRRMAREGRAAAGVLENRDVASEDEERGGREGMERTRQFIPRSSARSPSLADPEFRVGGCGQRHGRAEVELAQTSGFMGEQGCSAADPGRRSDPRPRLPRAVLGSLQSPDFGARTSHDSTAGTTRQMRGEEGGAWFNHKMGIDCITNEVPP

SEQ ID NO: 82630 - protein, 171 aa, Zea mays
  Coding DNA Sequence Number=SeqID_40851
  Subcellular localization annotation: CTP_CleavageSite=38; ConfidenceScore=5.30e-01
MTPIAVDPRVSFQGPLVTTHGPPLRLSRRRIEVGPRRRRMAREGRAAAGVLENRDVASEDEERGGREGMERTRQFIPRSSARSPSLADPEFRVGGCGQRHGRAEVELAQTSGFMGEQGCSAADPGRRSDPRPRLPRAVLGSLQSPDFGARTSHDSTAGTTRQMRGEEGGAW

SEQ ID NO: 82631 - protein, 152 aa, Zea mays
  Coding DNA Sequence Number=SeqID_40852
  Subcellular localization annotation: CTP_CleavageSite=44; ConfidenceScore=5.36e-01
MGNGNPNWSHDQKIMSRRRPPPPVLVARVAPTTSDTDPHTDVTVATSRTSLTTPPELYCRRFTPYSMICLRIRKIEKDNLEKPYKNDPKAIPIHYVILKGNLSLKDCNLADGEYILVPEQGAAQEVAPDPAPEPAPEDLPATALEGKPRFYA

SEQ ID NO: 82632 - protein, 246 aa, Zea mays
  Coding DNA Sequence Number=SeqID_40853
  Subcellular localization annotation: CTP_CleavageSite=35; ConfidenceScore=5.10e-01
MARARAYKTLPDLDCTLPRTLKPHRSRARRRLPVRSESAAAHSLCHRRPASGAIPNSVQPSEKIVHTSVRLPERGIGVYFAGEASPRSPELSTPPEYVDRVNPSTILRFLAHTVATIPREAHLALGLNQFAVVWPVYSPPTRTPACTRGPGDSGHLRRQAVPRRDRQSLPEPTPPFAGPPSPPFYPLFYNMLKDKENRKDCNLADGEYILVPEQGAAQEVALDPAPEPAPEDLPATALEGKPRFYA

SEQ ID NO: 82633 - protein, 759 aa, Zea mays
  Coding DNA Sequence Number=SeqID_40854
  Gene Ontology: Mol. function=translation initiation factor activity; Cellular component=membrane; Biological process=photosynthesis
  Homolog annotation: Hit_ID=Q6ZGV8; Match level="QueryCoverage=98%, HitCoverage=54%, E-value=0.0, Identity=76%"; Hit description =Eukaryotic translation initiation factor 3 subunit (EIF-3)-like
  Pfam annotation: Domain name=DUF727; Domain location=132-258; Score= -30.7; E_value=0.053; Accession=PF05303.3; Description=Protein of unknown function (DUF727)
ELHLYPVPVRTQSGEKLELQLSPGDSVIDVKQFLLDAPETCFYTCYDLILHTEDGSAHQLEDYNEISEIADITSGGCSLEMVAAIYDERSIRSHLRRVRELLSLSTLHVSLSTSLTLQQESAQGKSADSGKSPIQELDGLNFMEDSAGALTNLLASTPAEIKCVESMVFSSFNPPPTYRRLHGDLIYIDVATLEGNKYCITGSSKSFYVNSSNKNIFDSKPTKQGLEASTLVGLLQKISAKFKKGFREVLDRRASAHPFENVQSLLPVTSWLGAYPVPEHRRDAARAEDSVVLSYGTELIGMQRDWNEELQSCREFPHGNPQERILRGRALYKVTCDFVDAAVKGAVGVINRCIPPINPTDPECFHMYVHNNIFFSFAVDSDYEDISKDHKPDCQNGSSRSTKVSSPDVITKPDANHGKSAEVVDSKSEEAQLADSEQATYASANNDLKGTKAYQEADVSGLHNLAMAIVDYRGHRVVAQSIIPGILQGDKSDSLLYGSVDNGKKISWNETFHSKVVEAAKQLHLKEHVVLDGSGNPIKLAATVECKGIVGSDDRHYILDLMRVTPRDSNYIGQEHRFCVLRPELIASFVEVESIKQSLKQKVPDAPVASTSDAKATSVEGDDKSEESSVHTHEENDNSSSEILFNPNVFTEYKLAGSAEEIAADEELVKRAGTYLVDIVIPKFVQDLCSLDISPMDGQTLTDALHLHGINIRYLGKIAGMVKHLPHLWDLFSTEIIVRSAKHVIKLNAVRVFGLSIWK

SEQ ID NO: 82634 - protein, 1304 aa, Zea mays
  Coding DNA Sequence Number=SeqID_40855
  Gene Ontology: Mol. function=translation initiation factor activity; Cellular component=membrane; Biological process=photosynthesis
  Homolog annotation: Hit_ID=Q6ZGV8; Match level="QueryCoverage=99%, HitCoverage=93%, E-value=0.0, Identity=73%"; Hit description =Eukaryotic translation initiation factor 3 subunit (EIF-3)-like
  Pfam annotation: Domain name=DUF727; Domain location=132-258; Score= -30.7; E_value=0.053; Accession=PF05303.3; Description=Protein of unknown function (DUF727)
  Pfam annotation: Domain name=TPR_1; Domain location=1030-1063; Score =14.3; E_value=0.1; Accession=PF00515.18; Description=Tetratricopeptid e repeat
  Pfam annotation: Domain name=TPR_2; Domain location=1030-1063; Score =13.7; E_value=0.67; Accession=PF07719.7; Description=Tetratricopeptid e repeat
  Pfam annotation: Domain name=TPR_2; Domain location=903-936; Score =6.8; E_value=5.4; Accession=PF07719.7; Description=Tetratricopeptide repeat
  Pfam annotation: Domain name=TPR_2; Domain location=945-978; Score =10.1; E_value=2.2; Accession=PF07719.7; Description=Tetratricopeptide repeat
  Pfam annotation: Domain name=TPR_2; Domain location=988-1021; Score =3.3; E_value=14; Accession=PF07719.7; Description=Tetratricopeptide repeat
  Pfam module annotation: Pfam domain module=DUF727::TPR_1::TPR_2::TPR _2::TPR_2::TPR_2; Domain location=132-258::1030-1063::1030-1063::903 -936::945-978::988-1021
ELHLYPVPVRTQSGEKLELQLSPGDSVIDVKQFLLDAPETCFYTCYDLILHTEDGSAHQLEDYNEISEIADITSGGCSLEMVAAIYDERSIRSHLRRVRELLSLSTLHVSLSTSLTLQQESAQGKSADSGKSPIQELDGLNFMEDSAGALTNLLASTPAEIKCVESMVFSSFNPPPTYRRLHGDLIYIDVATLEGNKYCITGSSKSFYVNSSNKNIFDSKPTKQGLEASTLVGLLQKISAKFKKGFREVLDRRASAHPFENVQSLLPVTSWLGAYPVPEHRRDAARAEDSVVLSYGTELIGMQRDWNEELQSCREFPHGNPQERILRGRALYKVTCDFVDAAVKGAVGVINRCIPPINPTDPECFHMYVHNNIFFSFAVDSDYEDISKDHKPDCQNGSSRSTKVSSPDVITKPDANHGKSAEVVDSKSEEAQLADSEQATYASANNDLKGTKAYQEADVSGLHNLAMAIVDYRGHRVVAQSIIPGILQGDKSDSLLYGSVDNGKKISWNETFHSKVVEAAKQLHLKEHVVLDGSGNPIKLAATVECKGIVGSDDRHYILDLMRVTPRDSNYIGQEHRFCVLRPELIASFVEVESIKQSLKQKVPDAPVASTSDAKATSVEGDDKSEESSVHTHEENDNSSSEILFNPNVFTEYKLAGSAEEIAADEELVKRAGTYLVDIVIPKFVQDLCSLDISPMDGQTLTDALHLHGINIRYLGKIAGMVKHLPHLWDLFSTEIIVRSAKHVIKDILRQSLDHDIAPAIAHFLNCFVGKVLGASTKSSLSNAQSKTLKGHENSQTQKSTKGPKLSHAAVSRKSLSTYSHLTSDGIWFSIKEFAKSKYQFEVPDEARLSAKRVAVLRNLCRKVGITIAARKYDMDASSPFEASDMLNLQPVVKHSVPTCTDAKNLMEAGKVRMAEGTLNEAYALFSEAFSLLQQITGPMHKDAANCCRYLAMVLYHAGDTAGAIVQQHRELIINERCLGLDHPGHKPHSYGNMALFYHGLNQTELALRHMSRTLLLLSLASGPDHPDVAATLINVAMMYQDASNMNTALRYLQEALMKNERLLGPDHVQTAVCYHALAIAFSCMSLYKLSIQHEKKTYDILVKQLGENDSRTKDSENWLNTFKLREEQVNAQKQKDQGANASDNAVKFLKANPAFLQAMKAAALQSGDRSANVNRSLNAAVVGEGVPRLRGVDERAARATAEARKKAVARGLNVRNGPAANHASDELAQILKLINTASGSSTSASAKTEESASEGQATNGSVQNGAATDAKSADINVPPAPANQPVGLGATLELKKQKSKQKS

SEQ ID NO: 82635 - protein, 400 aa, Zea mays
  Coding DNA Sequence Number=SeqID_40856
  Gene Ontology: Mol. function=oxidoreductase activity, acting on paired donors, with oxidation of a pair of donors resulting in the reduction of molecular oxygen to two molecules of water; Cellular component=membrane; ...
  Gene Ontology: Cellular component=Biological process=fatty acid biosynthetic process
  Homolog annotation: Hit_ID=Q1T6Y2; Match level="QueryCoverage=92%, HitCoverage=99%, E-value=0.0, Identity=79%"; Hit description=Delta -12 fatty acid desaturase
  Pfam annotation: Domain name=FA_desaturase; Domain location=109-361; Score=314.7; E_value=1.6e-91; Accession=PF00487.14; Description =Fatty acid desaturase
LSSARRFGDKTTAVGKQDSTRNNSPSKMRAGARLIEKEQQEQRAPVEKPPFTLGQIKKAIPPHCFERSVLKSFSYVLRDLVTAAALLYLALVTIPALPSPLQYAAWPLYWIAQGCVCTGLWVIGHECGHNAFSEYPLLDDIVGLVLHSSLMVPYFSWKYSHRRHHSNIGSLERDEVFVPKKKEALPWYTPYVCNSPVGRLLQIVVQLTLGWPLYLATNVSGRPYPRFACHYDPYGPIYSDRERAQVFVSDAGVVAAWFGLYKLAATFGFWWVVRVYAVPLVIVNAWLVIVTFLQHTHPALPRYDSSEWDWLRGALATMDRDYGALNRVFHNITDTHVVHHLLSTVPHYHAVEATKAIKPILGEYYQFDPTPIAKAMWREARECIYVEPENGRGILWYNKF

SEQ ID NO: 82636 - protein, 477 aa, Zea mays
  Coding DNA Sequence Number=SeqID_40857
  Gene Ontology: Mol. function=oxidoreductase activity, acting on paired donors, with oxidation of a pair of donors resulting in the reduction of molecular oxygen to two molecules of water; Cellular component=membrane; ...
  Gene Ontology: Cellular component=Biological process=fatty acid biosynthetic process
  Homolog annotation: Hit_ID=Q1T6Y2; Match level="QueryCoverage=77%, HitCoverage=99%, E-value=0.0, Identity=79%"; Hit description=Delta -12 fatty acid desaturase
  Pfam annotation: Domain name=FA_desaturase; Domain location=186-438; Score=314.7; E_value=1.6e-91; Accession=PF00487.14; Description =Fatty acid desaturase
MTKYISKNSITRRKLCKDPVNGSLASRHHHTRTYNSKAKPLKLQVSEPTKGHHAIPQASAPQDALETRRPQSANRIALETTVPGRGNRICHLPVCFALFQANPKMRAGARLIEKEQQEQRAPVEKPPFTLGQIKKAIPPHCFERSVLKSFSYVLRDLVTAAALLYLALVTIPALPSPLQYAAWPLYWIAQGCVCTGLWVIGHECGHNAFSEYPLLDDIVGLVLHSSLMVPYFSWKYSHRRHHSNIGSLERDEVFVPKKKEALPWYTPYVCNSPVGRLLQIVVQLTLGWPLYLATNVSGRPYPRFACHYDPYGPIYSDRERAQVFVSDAGVVAAWFGLYKLAATFGFWWVVRVYAVPLVIVNAWLVIVTFLQHTHPALPRYDSSEWDWLRGALATMDRDYGALNRVFHNITDTHVVHHLLSTVPHYHAVEATKAIKPILGEYYQFDPTPIAKAMWREARECIYVEPENGRGILWYNKF

SEQ ID NO: 82637 - protein, 231 aa, Zea mays
  Coding DNA Sequence Number=SeqID_40858
GALFDRMWGLHGREAVRERFDRAIEQMVHAEDVDDLGGLDGALPEAAEVDLVPPSDASEGPSATPAPTAAGEDPASAPAPTGEDALKVVAEPAAEPAVEDPTAAAGPSQVLGFGPAHATATDIAIFVAASTVAADDDSFGSVSKCFESDDSGSSIAWTEESSDENLDYFAALDVAAAEPSPHAKGSEELSVTSTGYRRRRAVAKWRVSGLSRSGGRHRSEMESGRLRVDGT

SEQ ID NO: 82638 - protein, 58 aa, Zea mays
  Coding DNA Sequence Number=SeqID_40859
MAGVAGIARSTCAGGCSRRWRVCRPNHGDLVQSNGTVIKCTTTFIFGPSHDHKVFMTF

SEQ ID NO: 82639 - protein, 103 aa, Zea mays
  Coding DNA Sequence Number=SeqID_40860
MARARAYKTPRDLDRTPPHALNLAGAQTHRRLPPLRHPVKLTVPLDWTRSPWFGRHTRRRREHPPVHVDRAIPTIPAVEPYTVVTVRTSRSQPRPSPDLSRRR

SEQ ID NO: 82640 - protein, 96 aa, Zea mays
  Coding DNA Sequence Number=SeqID_40861
  Gene Ontology: Mol. function=two-component response regulator activity; Cellular component=voltage-gated potassium channel complex; Biological process=two-component signal transduction system (phosphorelay)
  Homolog annotation: Hit_ID=Q9ZQW0; Match level="QueryCoverage=69%, HitCoverage=58%, E-value=6e-22, Identity=66%"; Hit description =Response regulator 1
MATAAAAPASVAPSLVPKANDSRKAVVPVDASELENHVLAVDDKSVDRAAIARILRGSSMIITDYWMPGMTGYELLKRVKESAALRGHLRPSLCRL

SEQ ID NO: 82641 - protein, 97 aa, Zea mays
  Coding DNA Sequence Number=SeqID_40862
  Gene Ontology: Mol. function=two-component response regulator activity; Cellular component=voltage-gated potassium channel complex; Biological process=two-component signal transduction system (phosphorelay)
  Homolog annotation: Hit_ID=Q9ZQW0; Match level="QueryCoverage=76%, HitCoverage=47%, E-value=7e-30, Identity=89%"; Hit description =Response regulator 1
  Pfam annotation: Domain name=Response_reg; Domain location=2-90; Score=-5.6; E_value=0.0095; Accession=PF00072.14; Description =Response regulator receiver domain
MLAVDDKSVDRAAIARILRGSRYRVTALKSATRALELLAMGLLPDVSMIITDYWMPGMIGYELLKRVKESAALRGIYVVIMSSMIIVIYTFSNKILR

SEQ ID NO: 82642 - protein, 367 aa, Zea mays
  Coding DNA Sequence Number=SeqID_40863
MTVAGAREQRSRRQPGSRPIQGQQESLLSRREDGAPVIRSSNGSRTRNGRPANYSPRRINSAAGQAALLAGAAGDASPSPKQPRQKRDRERGILRKGSFPVKEPGSKPPLLIRGSKAGPPRGSTVASDRVGPTPTTGQRFEGRPPEGLHGRLRLLGLRAHYWSGVRRLAPEGFTVASDAERGMTRGTLGHFRDQRERSCNGIPSEGGIEPSDPVARGPGPADHPQRLGGCSRKPGSGQTVDSVNIPARELGPRPYTRATASSHEGTTRLAEALRKALRPRRSETTPPRPRGLHPAGALARTHRNKMQPRKAGPLAKKCDESLQASANTPFEARGLLSGTIIRGTLKTPNSQLVTPISIKLQRPDGCD

SEQ ID NO: 82643 - protein, 175 aa, Zea mays
  Coding DNA Sequence Number=SeqID_40864
MRKGSGGATFEVVLGPVYAIRTWGPVTPQVRTGAAGARAPRGSPIREGLGMSCLSGTIIRGILKTPNSQLVTPSAQSCKGLMGAIKSGISPFEGLDHASPEPNLGQGQPIPEDLRLARGPPPATNILPAHPRPCLRQEATLTKSPRRPTKSQKHLLQRWPDTFILTHALQSAEPK

SEQ ID NO: 82644 - protein, 203 aa, Zea mays
  Coding DNA Sequence Number=SeqID_40865
  Gene Ontology: Mol. function=translation initiation factor activity; Cellular component=signalosome complex; Biological process =regulation of translational initiation
  Homolog annotation: Hit_ID=Q8GVI0; Match level="QueryCoverage=66%, HitCoverage=48%, E-value=1e-33, Identity=76%"; Hit description =Putative eIF3e
  Subcellular localization annotation: CTP_CleavageSite=58; ConfidenceScore=5.28e-01
MIGKEAGCILCIGVFLSPSSNVKQVLTRLKLCISTPNFSLSVVTTQGLLITFTSIVLCAQTVSEMYLNAIQTNAHHLIRYLATAVVVNKRRRNMLEELIKVIQQEHHSYKDPVTEFLECLYVNYDFDGAQQKLIECEQMVGDWVTTYCLEEDGFLKVLYATTVRLGIMDRPEYVGKVYMERGTKACQVSVHIGTSDKFPEVRP

SEQ ID NO: 82645 - protein, 141 aa, Zea mays
  Coding DNA Sequence Number=SeqID_40866
MEIVEYAEATPLALEIIPDMTAEATVAPVEETEANSSKTEEHPKLQSPLTMTRAAPPGPPALLLWGVLYITSVSSQKIIAQQVVGNNVHELTKVSRKSNAGIPRLTAIAAKSTQEPPYMPTPTALAPIRYSNSIDYPKIQG

SEQ ID NO: 82646 - protein, 69 aa, Zea mays
  Coding DNA Sequence Number=SeqID_40867
MAVRPCVWAENEVFAMTRGPKTMNSPKSWEGVSSAEPRTPSWPSRGRSAPYRAQLRLALLAAWPAVVRP

SEQ ID NO: 82647 - protein, 89 aa, Zea mays
  Coding DNA Sequence Number=SeqID_40868
  Subcellular localization annotation: CTP_CleavageSite=39; ConfidenceScore=5.04e-01
MANGPKTDFRPRPRKRARGRARDPPVVPPRETWKFGSTREGKRNSPKSWEGVSSAEPHTPSWPSRGRSAPYRAQLRLALLAAWPAVVRP

SEQ ID NO: 82648 - protein, 75 aa, Zea mays
  Coding DNA Sequence Number=SeqID_40869
MANGSKTVFGHGRENGHAEGHGTLPWSPRNSPKSWEGVSSAEPRTPSWPSRGRSAPYRAQLRLALLAAWPAVVRP

SEQ ID NO: 82649 - protein, 210 aa, Zea mays
  Coding DNA Sequence Number=SeqID_40870
MANGPKMDFRPRPRKRARGWARDPPVVPPRETWKFGSTREGKRNSPKSWEGVSSAEPRTPSWPSRGRSAPYRAQLRLALLAAWPAMRLRWRMSCLGPVTAWRTPATVRPTPGARVPSLVQASYACCAEKCLRAATRPTGSRARYTLPSSSSPPGVRLIGSRAPAAFASCRRRPMAGGTEDTSLALLVSDVAHAEGRRRVGVTRPRIGPPE

SEQ ID NO: 82650 - protein, 56 aa, Zea mays
  Coding DNA Sequence Number=SeqID_40871
MLVDYTTVLDRPCVSVESPTQQVSPAGWTDLTPCDTVDASPCEKAKRGSPTYEQCT

SEQ ID NO: 82651 - protein, 327 aa, Zea mays
  Coding DNA Sequence Number=SeqID_40872
  Subcellular localization annotation: CTP_CleavageSite=48; ConfidenceScore=5.21e-01
MGSGHSTCSAEHCVMMSNYVIVVYVTSDPGTYMVRVRFTFQNRMARIRCTARKSVIPFLPSRLAERPLRRMVSGQSSQLERLHRRLHEEQERRCQEQEQQDSSPLPQQEVEYERPPSPAPQLEMPPAPPQGIPAAGGDPDGDGDDDDDDAGGSSSHDTELSEEPEPEGWIARPITHDVARGCHFHDALDTLLRQAFDRHTWSIEYRCVVYQHRRGGVADGLDLKYYPRRSTGSAGGVIVSPVGEGNPRLSSMVNLIAVLNTELDHALDELGKVRAEVAELRAECPTRHYLDGGSPAPVGIHHPYHSPPRSRFDYGTPDCKTRIDLDP

SEQ ID NO: 82652 - protein, 255 aa, Zea mays
  Coding DNA Sequence Number=SeqID_40873
MQVACNRTTGAHPFDFVASSMEAQAHTSCKKRAGYYVRETAPPLAPMSRLLDCVTSAVTRGNPERGPTVPIEHIDHGSDIHGRRRDGRYGQKWAGSNGGSRRAEAAVKSSAGSCPLLEQQGSPLPRREDDAPMFRSSNGSRNDRPTNRLSRRIKGLFGSWQNVPHFAEAASKHSGSAPTTDQGFEGWPLEGFDSRPRARRARDDSGYVRYMAEARATLPSRWSDRDKTGRGTLRSIRHQTKACGDVIPQRGLVQL

SEQ ID NO: 82653 - protein, 313 aa, Zea mays
  Coding DNA Sequence Number=SeqID_40874
MWAWASMLDATKSKGVRPRGAVLVGRWSPSSVLRWWQPEKPPEAEVIVAAAVVVGEPEAAVSAREEASSTQEQVASQAEEVQRRRLELGQVVRQQDQPRSHAAEAVSRADVLGGQLAEATERPVEVSAWARTLAETLATMAQARCWRPPSRWRSFRLCRRPRPGQIPPKAETTPKDLFVGSRIIYSSESYFSRKVMSEVSVSRRRRSPSARSASSLTCTLTRSLDSVIDIVEKARKLFWQKSFRALRLVWQQNRLSGRELLIAEGSTIEAVEKRERRSGRKTFSEENFDAQRGFPLLAPEGGLGFAEARLTLP

SEQ ID NO: 82654 - protein, 312 aa, Zea mays
  Coding DNA Sequence Number=SeqID_40875
MKPLGRQYSFLRYKIRKVNFVIFVVDGVAVLESMDDSNKGYTEILRQTFMYPFLSIGDDKPVVVVTHGDRLLIQQRVHVQAELAELLDIPAQQIYDIPEQNLPVKLNYHLEVLGRETLNKMAEQLMGLDAVIEAAIFSYASCDFLLDLLYNKYYERMLVFHKIIVQLMKIQCWSSFSCLVALPLLVILAVSMSEVEALYKLFKKINNAFIDDGLINKYHCQRCGGLFYSSCTQQRMILRGQDELNIEDANIVPFKCIQDHQIKIGLKTQKDNNLRKTDLTHGSEVSARGACETVVSARYDEGGEKVARTRVA

SEQ ID NO: 82655 - protein, 312 aa, Zea mays
  Coding DNA Sequence Number=SeqID_40876
  Pfam annotation: Domain name=MMR_HSR1; Domain location=51-226; Score=- 15.1; E_value=0.024; Accession=PF01926.13; Description=GTPase of unknown function
MWTPSATSTANCVRRKSSSGESQPLSRYKPGDWIEGVGSAKAGHFVLPEVTTLLLVGPRGSGKSTLVNRITRVFDKDDDPFAPDRAQVSCNSKSNGTMFLREYPIPRNSSAVCIYDTRGWSNDLEKNFKMLHQWMTKGISHGETTMWDDDEGNKIGNMKPLGRQYSFLRYKIRKVNFVLFVVDGVAVLESMDDSNKGYTEILRQTFMYPFLSIGDDKPVVVVTHGDRLSIQQRVHVQAELAELLDIPAQQIYDIPEQNLPVKLNYHLEVLGHETLNKMAEQLMGLDAVIEVAIIFLCILVLLLRFSDKLVQP

SEQ ID NO: 82656 - protein, 303 aa, Zea mays
  Coding DNA Sequence Number=SeqID_40877
  Homolog annotation: Hit_ID=Q75LM5; Match level="QueryCoverage=14%, HitCoverage=17%, E-value=1e-08, Identity=68%"; Hit description =Expressed protein
  Subcellular localization annotation: CTP_CleavageSite=51; ConfidenceScore=5.02e-01
SRPAPEEAKGPVPPSSAANNPTEEGRSCPRWRIVWRKQVVPSGVAFSSTARSTLLSKEGRGLALPRDPLPHRAAFRAGAVASPPPPPPPLSPSVPRLRVPSLASPAPPPPSYAENLHGVRFSGIHSPTGLLSLRGRDLLHGEIHAALQGRTRTCSTPRSTPPPSCFPTEVANSSYARSTLLSMEGRGPTVPRCGNLLGDSSNTRGKNLAVSRDQGAVQMPTIIVSVDLECSCCRAKIEKVLNRIQEKGEFCIDDIDLDEKSNKVTTLLLVGPRGSGKSTLVNRITRVFDKDDDPFAPDRAQVS

SEQ ID NO: 82657 - protein, 341 aa, Zea mays
  Coding DNA Sequence Number=SeqID_40878
  Subcellular localization annotation: CTP_CleavageSite=41; ConfidenceScore=5.33e-01
MELVLLCRRHASTFAAPSPLSRQMPGPPRGQVPSTAPRPPRGRAAVGLLHPAPGSQAPSRKPRHEATGPRGILRWRGHCTVVRARPQRRGLSTARTSGTPARTGPAKWASSAPAAHEYGTLARRRGIRPWQVRAGAQPRRERSCPRHRRQRRGAAAWIRPKNPPICGDQGDQRHGWRWLRRGVGGAPGYVLSLPAAALPLPVAVSCLDATVRRKGRSHIRHRGHPSGWWAFSLPIPASEEAKGSVPPSSAANNPTEEGCSCPRWRIVWRKQVVPSGVAISSTARSTLLSKEGRGLALPRDPLCNTPGSLEDMVAGVTWPSALPPGWTVEWDPASAEEEHAE

SEQ ID NO: 82658 - protein, 110 aa, Zea mays
  Coding DNA Sequence Number=SeqID_40879
MTSPTPIKGGDTRFSFDYLSHEGFPSILWEVLSSAGYPTPPLYTLGWRSLDSETIGFRAEDTTEAAALKTLTTFCGYHPLEMVMHPLGLFPAEKRDDPMWCNRVSHVKDV

SEQ ID NO: 82659 - protein, 75 aa, Zea mays
  Coding DNA Sequence Number=SeqID_40880
MRLKELLLSMMTMVKNGTDLKENGLLSPRQLALWLIENVRDMNMNSNTILDTLRCNRSRVSHTLAFRQAEGINEI

SEQ ID NO: 82660 - protein, 153 aa, Zea mays
  Coding DNA Sequence Number=SeqID_40881
  Pfam annotation: Domain name=zf-CCHC; Domain location=123-140; Score =16.6; E_value=0.0018; Accession=PF00098.13; Description=Zinc knuckle
MRLKELLLSMMTMVKNGTDLKENGLLSPRQLALWLIENVRDMNMSDLGMSTISDFTKCKECVDELQSFPKRKHHKDAQPQEETHECFIDGWTITCTQFKPRGRIRSKKQKGKHGKSQEITSRKACYQCGREGHYFCNCPEKSSLQITSEIKLS

SEQ ID NO: 82661 - protein, 438 aa, Zea mays
  Coding DNA Sequence Number=SeqID_40882
MRRGLSVLLVSWKSGKNTRTHKDLEWFGPPERETSCRRDDEYRTPLGMGALFPNRLVRLAVFWESGVPLWRFGPIDTPRDHLHTVEEGTPDSGYRQWPPGPPQGRMRACRLLAWRFAFLTAGYGKDEGALNRGAVACPLWGAPVFSGGIRVRAVSSGDLIAEELALVVVPPIIPVATSDRWSSTRMTTSLVVERSEPACGLPPALSFKDVHHPRWGGGRAESGLRLSRGLAARFFLQHSGEKGVRQPCEGGKLRLRGVGHIHGFSRAAGHTGGGSYKTSYAAGAAAAFLDGLVFTPAARTGARTSSHVLGQLPPIGAEVVNAAGGAQVVAPAGEAAHCRGGCLCWRYHQCHLIPDLRLFGFNGLVVAPVGRRGRGPFHSGVHAEVIAAAEVATTVGADVVASVGEPLGASYPAVLTGVEVLGEGDDVLAIGFSSNGGD

SEQ ID NO: 82662 - protein, 419 aa, Zea mays
  Coding DNA Sequence Number=SeqID_40883
MRRGLSVLLVSWKSGKNTRTHKDLEWFGPPERETSCRRDDEYRTPLGMGALFPNRLVRLAVFWESGVPLWRFGPIDTPRDHLHTVEEGTPDSGYRQWPPGPPQGRMRACRLLAWRFAFLTAGYGKDEGALNRGAVACPLWGAPVFSGGIRVRAVSSGDLIAEELALVVVPPIIPVATSDRWSSTRMTTSLVVERSEPACGLPPALSFKDVHHPRWGGGRAESGLRLSRGLAARFFLQHSGEKGVRQPCEGGKLRLRGVGHIHGFSRAAGHTGGGSYKTSYAAGAAAAFLDGLVFTPAARTGARTSSHVLGQLPPIGAEVVNAAGGAQVVAPAGEAAHCRGGCLCWRYHQCHLIPDLRLFGFNGLVVAPVGRRGRGPFHSGVHAEVIAAAEVATTVGADVVASVGEPLGASYPAVLTGVE

SEQ ID NO: 82663 - protein, 430 aa, Zea mays
  Coding DNA Sequence Number=SeqID_40884
  Pfam annotation: Domain name=DnaJ_CXXCXGXG; Domain location=106-179; Score=-27.7; E_value=0.0052; Accession=PF00684.9; Description=DnaJ central domain (4 repeats)
MEYSSFSSGTERAVKTWQATVGASENGVMTSELLEWLFSGKTGEDVKTKDGTNGAAVPAVTGIAEVRKTTVAENGVSGVGVSEHRVFLLGENRWEDPTRLTHNKKTASTGTVASTKTCISCRGEGRLMCLECDGTGEPNIEPQFLEWVGEDTKCPYCEGIGSILCDVCDGKKFYHRTGECVQMAVRVDCCPAESGDISNSVTLLWYNRRWKNTREEEDSFPKSGRFVNSSNICRLPTCTKKSSHIHIVPMTQHPLETGSLSDRNEEPALHAFSQSSHSSFSHHSTEPHTCFSFPQLYLYALLSGMLLRLGQSSTRMVSRLGKSLGLHMLLRLLTSVSTIDLRFSNSARVLSVHSSSCPLLEGWPRLITTTFFNNLQQPIAMGYDEPLEHSKLQDPCDVLQPGPTRNGQFADVLKMVGRCCNDDVLQCRKN

SEQ ID NO: 82664 - protein, 383 aa, Zea mays
  Coding DNA Sequence Number=SeqID_40885
  Gene Ontology: Biological process=peptidoglycan metabolic process
  Pfam annotation: Domain name=DnaJ_CXXCXGXG; Domain location=313-383; Score=-35.2; E_value=0.029; Accession=PF00684.9; Description=DnaJ central domain (4 repeats)
  Pfam annotation: Domain name=PG_binding_1; Domain location=185-248; Score=29.6; E_value=1.1e-05; Accession=PF01471.9; Description =Putative peptidoglycan binding domain
  Pfam module annotation: Pfam domain module=DnaJ_CXXCXGXG::PG_binding _1; Domain location=313-383::185-248
  Subcellular localization annotation: CTP_CleavageSite=41; ConfidenceScore=5.61e-01
MIAAAVAAGAATAFPFVSTAYRRPRLQQPCPRRAAAVLPARATGGASSWEEREEARWLREEQRWLREEQRWLREESRWRAEREALLAEVAALRLRLRALEGARPDHLAVAVDAVASPAPPPAVPAPQPQAGAHPGGSRGGGRGRGEEGGGGGPREEGGAQGRGGGERRSWCQREQEDAEDGGRGRGRARDAGDEALQKLGFYSGEEDMEYSSFSSGTERAVKTWQATVGASENGVMTSELLEWLFSGKTGEDVKTKDGTNGAAVPAVTGIAEVRKTTVAENGVSGVGVSEHRVFLLGENRWEDPTRLTHNKKTASTGTVASTKTCISCRGEGRLMCLECDGTGEPNIEPQFLEWVGEDTKCPYCEGIGSILCDVCDGKKVMAS

SEQ ID NO: 82665 - protein, 120 aa, Zea mays
  Coding DNA Sequence Number=SeqID_40886
  Gene Ontology: Mol. function=zinc ion binding; Cellular component =integral to membrane
  Homolog annotation: Hit_ID=Q5N6U7; Match level="QueryCoverage=81%, HitCoverage=40%, E-value=3e-32, Identity=67%"; Hit description =Putative MTD2
MAQRGELGRQLPLRGPLKALEADIHHANAMADAIQRNYGGSCVQMRLSFSSLAPLFLYFIQWLDCGCCYALPSYLGLFHILICKVYADGDSSVSTYERRASLREFYGDWLCNLDMDFESN

SEQ ID NO: 82666 - protein, 178 aa, Zea mays
  Coding DNA Sequence Number=SeqID_40887
MPLGDDAEAKDFVLPDELLAALPRDPYEQLASTKRSSPLTMRRFMLMEIAQCRHMKGEQALGNSMQLESSLIERDLKGKGRCKDIVSRRRMEDWKKPPRRLQESRPPSPVPGSAIPVRVRPSAAPTRPQQGRPPPAKQGQSACSLAPALSGMLKHYPHQTTFNLSGMLIAQANNIAFS

SEQ ID NO: 82667 - protein, 398 aa, Zea mays
  Coding DNA Sequence Number=SeqID_40888
  Homolog annotation: Hit_ID=Q75HV1; Match level="QueryCoverage=14%, HitCoverage=6%, E-value=2e-12, Identity=63%"; Hit description =Putative kinesin-related protein
  Subcellular localization annotation: CTP_CleavageSite=57; ConfidenceScore=5.39e-01
MVLFTKVVLGVLPSPMSISSKGSADASTQQIGARFCRSLPRTRLEAGTFPAAPDRTLADLAPAPALPPPALPLFPRRPAADLALATQPRTLPRAMEAARSKAQQRAKPGTRPIRLGFCLTHLARPPRRDLAVEAMPLGDDAEAKDFVLPDELLAALPRDPYEQLASTKRSSPLTMRRFMLMEIAQCRHMKGEQALGNSMQLESSLIERDLKGKGRCKDIVSRRRMEDWKKPLRCLQSAPSLSLSAHAHLVQPPRRLQESRPPSPVPGSAIPVRVRPSAAPTRPQQGRPPPAKQGQSACSLAPALSGMLKHYPHQTTFNLSVENAAVGSEVEQEEPKKEAMAGVGETLRSFMEEFGDQGEDSIILSPRLKEISTPDRPAALRFLGAKVLCYTCALTMFL

SEQ ID NO: 82668 - protein, 371 aa, Zea mays
  Coding DNA Sequence Number=SeqID_40889
  Gene Ontology: Mol. function=microtubule motor activity; Cellular component=microtubule associated complex; Biological process =microtubule-based movement
  Homolog annotation: Hit_ID=Q75HV1; Match level="QueryCoverage=91%, HitCoverage=48%, E-value=5e-71, Identity=71%"; Hit description =Putative kinesin-related protein
  Pfam annotation: Domain name=Kinesin; Domain location=183-371; Score =63.8; E_value=4.6e-18; Accession=PF00225.13; Description=Kinesin motor domain
MEPDPVAAGASSSPPPSPAPATSPPWQTRDDDEPGAVDCADPGGDLNPAPPPSLQQGTVENAAVGSEVEQEEPKKEAMAGVGETLRSFMEEFGDQGEDSIILSPRLKDISTPDRPAALGFLGEKYNNLMERYKKYKKQVVKCSEECEPRYNGLKKKYTDECAERRRLYNELIELRGNIRVFCRCRPLSSDEVNRGCLSVVEIDPSQESELQFVPSEKERKPFKFDHVFGPEDDQEAVFSKTVHVVRLDIKQNADGTQEVHGLVEAPVYNIDDVWEKLKFGAQNRSVGSTNSNELSSRSHSLVRVTVRSEHLVTYQRSRSHMWLVDLAGSERIAKTGVEGDRLKESQFINKSLSALGDVISALASKNSHIPY

SEQ ID NO: 82669 - protein, 166 aa, Zea mays
  Coding DNA Sequence Number=SeqID_40890
EVKPKKALPWPMVIYENGSLMMSCGLAYKAIYGDLNTKDEGSTHRHQDGVRQGRQVRRVLEIVDQVLYIDNYSYGGGGRSLSWVRGRIEFKDVEFTYLSQAEAMVLYNLHLTITSTKMLALWDMCLYRLLKKTSYELLTAKQISGPTATGKVGNRRNSYPINDLLL

SEQ ID NO: 82670 - protein, 183 aa, Zea mays
  Coding DNA Sequence Number=SeqID_40891
MERPTSHLFYLRFKSPTEVKPKKALPWPMVIYENGSLMMSCGLAYKAIYGDLNTKDEGSTHRHQDGVRQGRQVRRVLEIVDQVLYIDNYSYGGGGRSLSWVRGRIEFKDVEFTYLSQAEAMVLYNLHLTITSTKMLALWDMCLYRLLKKTSYELLTAKQISGPTATGKVGNRRNSYPINDLLL

SEQ ID NO: 82671 - protein, 170 aa, Zea mays
  Coding DNA Sequence Number=SeqID_40892
MEFEALRKELFVKVQSLYREPEQIRFENKQIPAIREGLHDIQEEISRASINVDAYALWHMHDMSISTYLDEEGSLEDHEGKEHNRKKKGILGELNNVQPKLSKDLMKHKNIIKGCKFIQNPKGEDCNLADSYILVPGQGVAQEVVQEPAPESAIEDLPTPALEGKPRFYA

SEQ ID NO: 82672 - protein, 88 aa, Zea mays
  Coding DNA Sequence Number=SeqID_40893
  Homolog annotation: Hit_ID=Q8LQ53; Match level="QueryCoverage=37%, HitCoverage=8%, E-value=1e-10, Identity=81%"; Hit description =Protein kinase 6-like
MEFEALRKELFVKVQSLYREPEQIRFENKQIPAIREGLHDIQEEISRARSSMGHAYNRKCGVYNFGNYLWEIYCCNMPYPDLSFSFTR

SEQ ID NO: 82673 - protein, 117 aa, Zea mays
  Coding DNA Sequence Number=SeqID_40894
LKTLLSYFVHFVLAWYCLMVKLLSFSPLKVSAAHTGTEDQVGPNNSDSEDVDDEEEEEELEGYDSPPMTSKSPAREADSSARVCAGHAEQGPAPDLTRGVDGTSDGRSSKWEALSGR

SEQ ID NO: 82674 - protein, 144 aa, Zea mays
  Coding DNA Sequence Number=SeqID_40895
MTGGCTGRDTGTGERRAGARAAEGKEALTAREAAEQTANMRTGGDDQPCRVEPCRARRVGVERRRGAGAAAGEGGAAVAGVEARAPPGRESGASAAGVAAPVGEGCRKKPVCAMVVRSATSSSSVPCDRLRGSGSSDVTGRRRP

SEQ ID NO: 82675 - protein, 363 aa, Zea mays
  Coding DNA Sequence Number=SeqID_40896
  Subcellular localization annotation: CTP_CleavageSite=84; ConfidenceScore=5.05e-01
PSPPGRLILPSRGRPPSSQPPLYLPAALPLSGRANGGCCGEATPPHGAGPQLLFVLHLLSLVYGRRLPVTSLLPDPLNRSQGTEEDEVAERTTIAQTGFFLHPSPTGAATPAADAPLSRPGGARASTPATAAPPSPAAAPAPLRRSTPTRRARHGSTRPAQRRLCPTRLDSLPPAVATPAMGLAASLPNPRSGLPESAPPPRTGLVVAAGPHVGRLLRCLSGCEGLLPLGRSRTCAPLPCAGISACAAPCHRASHLLIARAIAPAAPPTSSFSCHRCRQHPLPGPAQAPARLDTPCRPPPFFAFAGSVAAAAFPAGSTLLRPFWLDPPSLWLDRVFPTASVAAVAFPAGSVVSPSILPRARTP

SEQ ID NO: 82676 - protein, 515 aa, Zea mays
  Coding DNA Sequence Number=SeqID_40897
MELSHNLMKKGPNGASTTWERIQDEDRTPDSVSVRTLARLGRWQDWWTVSLSPNVFQDHAGSDQGAVSAVAASGQQHGTPARGTPAPDARGTSAQRLRRSARRGTSARRAGPDASGDLHGAATAARGTRQGLGGGILLGGGLLRCDRNKNDSVNYNGNAVSDQDLSLALHQAYASYDYTLPLSGRANGGCCGEATPPHGAGPQLLFVLHLLSLVYGRRLPVTSLLPDPLNRSQGTEEDEVAERTTIAQTGFFLHPSPTGAATPAADAPLSRPGGARASTPATAAPPSPAAAPAPLRRSTPTRRARHGSTRPAQRRLCPTRLDSLPPAVATPAMGLAASLPNPRSGLPESAPPPRTGLVVAAGPHVGRLLRCLSGCEGLLPLGRSRTCAPLPCAGISACAAPCHRASHLLIARAIAPAAPPTSSFSCHRCRQHPLPGPAQAPARLDTPCRPPPFFAFAGSVAAAAFPAGSTLLRPFWLDPPSLWLDRVFPTASVAAVAFPAGSVVSPSILPRARTP

SEQ ID NO: 82677 - protein, 694 aa, Zea mays
  Coding DNA Sequence Number=SeqID_40898
  Gene Ontology: Mol. function=beta-galactosidase activity; Cellular component=beta-galactosidase complex; Biological process =carbohydrate metabolic process
  Homolog annotation: Hit_ID=Q8L3P5; Match level="QueryCoverage=94%, HitCoverage=79%, E-value=0.0, Identity=83%"; Hit description=Beta -galactosidase
  Pfam annotation: Domain name=Glyco_hydro_35; Domain location=30-309; Score=377.2; E_value=2.5e-110; Accession=PF01301.10; Description =Glycosyl hydrolases family 35
MRRWWPAALLGCAVAVSVLVAAVECAVTYDRRRIYGSEMWEGLIQKAKDGGLDVIQTYVFWNGHEPTPGNDSDGIFFRFEQYYFEESGFPVWLKYVPGISFRTDNEPFKTAMQGFTEKIVGMMKSENLFASQGGPIILSQASIIFSLDLIENEYGPEGREFGAAGQAYINWAAKMAVGLGTGVPWVMCKEEDAPDPVINACNGFYCDAFSPNKPYKPTMWTEAWSGWFTEFGGTIRQRPVEDLAFAVARFVQKGGSFINYYMYHGGTNFGRTAGGPFITTSYDYDAPIDEYGLVREPKHSHLKELHRAVKLCEQALVSVDPAITTLGTMQEARVFQSPSGCAAFLANYNSNSYAKVVFNNEQYSLPPWSISILPDCKNVVFNSATVGVQTSQMQMWGDGASSMTWERYDEEVDSLAAAPLLTTTGLLEQLNVTRDSSDYLWYITSVDISSSENFLQGGGKPLSLSVQSAGHALHVFVNGQLQGSAYGTREDRRIKYNGNASLRAGTNKIALLSVACGLPNVGVHYETWNTGVGGPVVLHGLDEGSRDLTWQTWSYQVGLKGEQMNLNSIEGSSSVEWMQGSLIAQNQQPLAWYRAYFETPSGDEPLALDMGSMGKGQIWINGQSIGRYWTAYADGDCKECSYTGTFRAPKCQSGCGQPTQRWYHVPKSWLQPTRNLLVVFEELGGDSSKIALVK

SEQ ID NO: 82678 - protein, 809 aa, Zea mays
  Coding DNA Sequence Number=SeqID_40899
  Gene Ontology: Mol. function=beta-galactosidase activity; Cellular component=beta-galactosidase complex; Biological process =carbohydrate metabolic process
  Homolog annotation: Hit_ID=Q8L3P5; Match level="QueryCoverage=96%, HitCoverage=91%, E-value=0.0, Identity=80%"; Hit description=Beta -galactosidase
  Pfam annotation: Domain name=Glyco_hydro_35; Domain location=33-353; Score=422.0; E_value=8.6e-124; Accession=PF01301.10; Description =Glycosyl hydrolases family 35
MRRWWPAALLGCAVAVSVLVAAVECAVTYDKKAVLIDGQRRILFSGSIHYPRSTPDVTAFYKISSPPTIPWRGLWLRIYGSEMWEGLIQKAKDGGLDVIQTYVFWNGHEPTPGNDSDGIFFRFEQYYFEESGFPVWLKYVPGISFRTDNEPFKTAMQGFTEKIVGMMKSENLFASQGGPIILSQASIIFSLDLIENEYGPEGREFGAAGQAYINWAAKMAVGLGTGVPWVMCKEEDAPDPVINACNGFYCDAFSPNKPYKPTMWTEAWSGWFTEFGGTIRQRPVEDLAFAVARFVQKGGSFINYYMYHGGTNFGRTAGGPFITTSYDYDAPIDEYGLVREPKHSHLKELHRAVKLCEQALVSVDPAITTLGTMQEARVFQSPSGCAAFLANYNSNSYAKVVFNNEQYSLPPWSISILPDCKNVVFNSATVGVQTSQMQMWGDGASSMTWERYDEEVDSLAAAPLLTTTGLLEQLNVTRDSSDYLWYITSVDISSSENFLQGGGKPLSLSVQSAGHALHVFVNGQLQGSAYGTREDRRIKYNGNASLRAGTNKIALLSVACGLPNVGVHYETWNTGVGGPVVLHGLDEGSRDLTWQTWSYQVGLKGEQMNLNSIEGSSSVEWMQGSLIAQNQQPLAWYRAYFETPSGDEPLALDMGSMGKGQIWINGQSIGRYWTAYADGDCKECSYTGTFRAPKCQSGCGQPTQRWYHVPKSWLQPTRNLLVVFEELGGDSSKIALVKRSVSSVCADVSEDHPNIKNWQIESYGEREYHRAQSALKMCTWAVHFRNQIRKLWDTYGNLWRFPARRLPLS

SEQ ID NO: 82679 - protein, 126 aa, Zea mays
  Coding DNA Sequence Number=SeqID_40900
MPRQCRGVETLWICATTISTRRVYGTAWANWRKGTTGYGEISRTDVQWQTDLFSRGRRRWAEHGRVRADAGPACRMPSPLPESRSHVATPMPTHSDGCGGELLAWGAETETAANDVGVGSRSASRT

SEQ ID NO: 82680 - protein, 70 aa, Zea mays
  Coding DNA Sequence Number=SeqID_40901
MPGGAHGAGAADPMQVDQPLPPAAAGTAHAPADAKLLRMGLWDNMGELAEGYDEVWRNFTDRRTVAKQIW

SEQ ID NO: 82681 - protein, 397 aa, Zea mays
  Coding DNA Sequence Number=SeqID_40902
MGAEHGVSGELQAGPTRSEAAVEPFGGPAFEPLISREARSLVPSRGRIPFGHPARRLCDAWAWASTLACRESEKRVHLARLHAACMAVRLFRPLVWAKVEGHFPAASLHRRSPKMVTSSLMVGESEPGCGLCSSLSLKDFHHQGWGGEEGRPSSVAPAAAPCLALGREWLRSHSQCRRLPRQLEEVLPPALIAKAGHGLTSNSTAFCPSLPHEFGHGRGPPGNSIRPEVSAAAVRPPGAEVVVVAAAGAGNDKPFVGLLLLRRPTPIEWGYSSVDYLNRFTKHESPRVKVTSEGPLGRSSMSRGQGRGLRSGWRPWEMVGRGSRGNRPSRLLGPDSWRSPWQRLPGRGDDVVLRSGDPRTASPSEARSGLAEGVVDAEGVAAPFQRQDPSLQGQSVL

SEQ ID NO: 82682 - protein, 49 aa, Zea mays
  Coding DNA Sequence Number=SeqID_40903
MGAEHGVSGELQAGPTRSEAAVEPFGGPAFEPLISREARSLVPSRVIVA

SEQ ID NO: 82683 - protein, 69 aa, Zea mays
  Coding DNA Sequence Number=SeqID_40904
MEVKFQFHPVDPNLHQFRLRGLHPSLHQQTLSQLETMHFDVACKVANATIKRWVLSYQAGCEEDIGRLN

SEQ ID NO: 82684 - protein, 472 aa, Zea mays
  Coding DNA Sequence Number=SeqID_40905
  Gene Ontology: Mol. function=helicase activity
  Homolog annotation: Hit_ID=Q6YTQ6; Match level="QueryCoverage=40%, HitCoverage=15%, E-value=6e-43, Identity=45%"; Hit description =Helicase-like protein
  Subcellular localization annotation: CTP_CleavageSite=51; ConfidenceScore=5.13e-01
MAAQGKPVNIGSKGKIVLVIDSSGVASLLMPKGRTAHSRFKIPFDMNETAMCTIRRGTMLAELIQVSSLIVWDEVPMTHRHCFEALDRTMRDTLSEDEPANAIIPFGGKVVVLGDISIRFYQLFVRDHDLRLLMLALPTLGFGAIKWVLSIGDCTIPVEKMDDEAEPLWIMIPPDLLIHDDGEKGGSAHAQIYPPLAVVFKPMIKEGNVYNISYIQIKKANRMYHFTDRWIVLQMVRESAGSRGNKPCNQHKRSPIMSATGSTQRVPRISTAEHKKKVGWLVTVTVLKIDQLWWYESCRKCLKKTKPHGDAYKFSDAGCGHVGLPNPRLLITVGDETGETDFILFGRMAQRIVKKPLDILITDNPAGFIPNEITRLMEKVYTFNVSFTDSTIALGNVCFQVKMIVAKIGDGGQVPISPSGSQPSSISSVWAASKSTSVDSIPTKACKVANATIKRWVHSYQAGCEEDIGWLS

SEQ ID NO: 82685 - protein, 73 aa, Zea mays
  Coding DNA Sequence Number=SeqID_40906
MRGPSPRPSWGLPLVLVRRLGSKGWRGPEDLVCVFVGVVEALCHSAWLGGVEAIVAFGVCLLPEFGGVDLCSW

SEQ ID NO: 82686 - protein, 169 aa, Zea mays
  Coding DNA Sequence Number=SeqID_40907
  Subcellular localization annotation: CTP_CleavageSite=11; ConfidenceScore=5.24e-01
MPACGRTAVTPAGATPTLLRVPSLDLSPPCGNPRLGLLGVFRWCSPDVGALKVGAAGLVGRRTTRGLRRKLCLVGTRRAATTFRRRFSFLKARPRRPLVCVFVGVVEALCHSAWLGGGEAIVAFGVCLLPEFGVVNLCSWRRIEAASCGSSCHYVQKNMESIEWFLWAK

SEQ ID NO: 82687 - protein, 163 aa, Zea mays
  Coding DNA Sequence Number=SeqID_40908
MEQGGEGGRHGCRGEELLRLLLSPWEEPCASQNRERGVGVGEKEKGWSRRRHPPPVLVARVAPTTSGADPHTDVTVATSRTSLTTPPELYCRRFELNKKTTQNSILEGKIGILFDQDCNLADGEYILVPEQGAAQEVAPVPAPEPAPEDLPATALEGKPRFYA

SEQ ID NO: 82688 - protein, 224 aa, Zea mays
  Coding DNA Sequence Number=SeqID_40909
MDVGELAARARTQGDAAPWLEQRGPRPRETPLSSAGRGVRSRKKNGRGGEIGLPAGGRRRGRREGRHGGSVCPAVLASSKWRGGTGFPAAGVREQWESCSRREEEGERSRRRHPPPVLVARVAPTTSGADPHTDVTVATSRTSLTTPPELYCRRFELNKKTTQNSILEGKIGILFDQDCNLADGEYILVPEQGAAQEVAPVPAPEPAPEDLPATALEGKPRFYA

SEQ ID NO: 82689 - protein, 108 aa, Zea mays
  Coding DNA Sequence Number=SeqID_40910
MDVGELAARARTQGDAAPWLEQRGPRPRETPLSSAGRGVRSRKKNGRGGEIGLPAGGRRRGRREGRHGGSVCPAVLASSKWRGGTGFPAAGVREQWESCSRREEEGER

SEQ ID NO: 82690 - protein, 192 aa, Zea mays
  Coding DNA Sequence Number=SeqID_40911
MGFSPRADGVVGGAVYNTKPFTGISSSTPMACTAWDCRGGGAMDKVLRILQQGRHARVEGRNRAGGRSEVEEEGAAGGRAEAPRHGRRRARCPSSDPRRCRALAGAEGPATKGNSTVLCWPWCKEQEKNGRGGEIGLPAGGRRRGRREGRHGGSVCPAVLASSKWRGGTGFPAAGVREQWESCSRREEEGER

SEQ ID NO: 82691 - protein, 239 aa, Zea mays
  Coding DNA Sequence Number=SeqID_40912
  Subcellular localization annotation: CTP_CleavageSite=55; ConfidenceScore=5.08e-01
MDMGTRIWIVIALWDGHGPFVHLYLRTIMIVLASVSASSFTILPSFLSPLCLRLRATPFSTEGIGAGVSSPYSSDTNPDTDPCGYCTSMRTFHSMRAPSFSPSSDVPFVFLPFALSFLPNLLPPPTVAAASQPRLINAGMGRLGLAPGLSSCVPPMRTRWRLSRLGYLVDEESSGILLMPPPDTQVFVVSFSDNEQGDIYPPQAPDLWVDLERSAFWIVRFWTSLGAPEVHPMGVALDL

SEQ ID NO: 82692 - protein, 183 aa, Zea mays
  Coding DNA Sequence Number=SeqID_40913
  Subcellular localization annotation: CTP_CleavageSite=55; ConfidenceScore=5.08e-01
MDMGTRIWIVIALWDGHGPFVHLYLRTIMIVLASVSASSFTILPSFLSPLCLRLRATPFSTEGIGAGVSSPYSSDTNPDTDPCGYCTSMRTFHSMRAPSFSPSSDVPFVFLPFALSFLPNLLPPPTVAAASQPRLINAGMGRLGLAPGLSSCVPPMRTRWRLSRLGYLVDEESRSEILDKQGP

SEQ ID NO: 82693 - protein, 468 aa, Zea mays
  Coding DNA Sequence Number=SeqID_40914
MVRSPAFALNLQSRDLAAFVREAEDGAVRLVGRIFELNQLPYDGYPGQDDVDRRGKKPVVETGDDPAPAAAPSSKKRKLGSDEGQLAVVAPAAATTAAAVVPKAKGGALSTGGEMSALAAVRDEAGTVSRRLKEVKEALSQAADFADRTASGALTAVVSAEVERLRTQHADAVCEKSATDSKCRKLADKVAALEGEKTDLRRQLAGERRETNEALAKAQAAQAEAKLARAEGNLARERAEQLQERLIAMESRVERAEAATCAEAERTRKQLMDSYHELGARTGDFEVPDREPELRCLEWGAMNALSREGCRHFEVFDQADEDFERDIYRVEDPIVKESAGAIYDRMWGPHGHEVVRERAETARAQAARGERVDDFGALNCALPDPEPIPAEAVSGATLEPPPETAEGAPDAPASAAAGGDLPPETAEGAPDAPAAGAARAEDPAAVAAEATVEATTEAPATAGSSQVA

SEQ ID NO: 82694 - protein, 825 aa, Zea mays
  Coding DNA Sequence Number=SeqID_40915
  Gene Ontology: Mol. function=cysteine-type peptidase activity; Biological process=proteolysis
  Homolog annotation: Hit_ID=Q53MK8; Match level="QueryCoverage=31%, HitCoverage=26%, E-value=5e-25, Identity=30%"; Hit description=Ulp1 protease family, C-terminal catalytic domain, putative
  Pfam annotation: Domain name=Peptidase_C48; Domain location=587-808; Score=-18.8; E_value=0.014; Accession=PF02902.9; Description=Ulp1 protease family, C-terminal catalytic domain
MWRRSATTELWMSARSRLPAPKAISSKSIDEGSRKSPARKTPSKNRTNNKKVICPHVYEPRETRVDRKETPVTTPSFLASEATRQRFPPLQSSAAPIQLSSFNLRALELDSRANAFPEVPDVYEHWTRFIQCLIMRSVDRPPSNPKRLTIESSQEKLNIRCIPYDVIVSTWIMSDRQRDAVARLGFSSIFDLRTDALDCRSLIRWLMDKLDPHDMTIRPGAGKELKITKETVRLILGLPCAGGGREFTDWYGEVNAAAKLRHDLKVGKEEFDVVKLQDKIVLGNDDQLSIRCFFLILFNRLLFPSASWGITNNEVLMTSNMARMADIDWCQLVYTDLCDAATRWHKRNKTNITATIYGCSLIVLIYYLDHLHHPASPDNKYGTPRIKFFDNETIRDLARGDRRPPRKTGEPFGHAEHRPMFESMFDAHDKEVDKYYDSLQLSHQMIVSKQIELSETFGEMIDEVLRAATQRDSQQEDIPPTTSMHPTNDPVSTPSVPTPDNQQHDQEIHVPTDDIKVSEHEGQKTVKHDTPVSGAPQFDKTPLTEATTELVEKDISSKSAVAEPPHISREECARKLFKFILSGQLDPSMTIMILKDLEVLSWMLSNRLVLINALRTFSCRHLSNTVLNIEEFEQHSSNPQPFSTSVLKEQLEPTLPPDEVLNQIKLILVPMLRRSHWTLYAINFQLRRIDILDSNPYGTLLGGTTWKQIHNDQLLINGTKIPWSRLIMRRLSIALHEARPDTSLPKFGNYKIGLLPNCPTMLPGSNDCGFFVANFLRYYDFDDGDLSEFYVPDEPLDQRAFVLHYLTFHRNNRVYPIPAELLPFK

SEQ ID NO: 82695 - protein, 83 aa, Zea mays
  Coding DNA Sequence Number=SeqID_40916
MACCICLFTHAATLLLLLSADDLSVAMCLILCPCESDFWLPSSIDFDDIAFGAGKRLHADIHSSGVADLLHISAAKQLCVAAT

SEQ ID NO: 82696 - protein, 111 aa, Zea mays
  Coding DNA Sequence Number=SeqID_40917
MAASLSHAQQQIPCSELLPHAVSGHHFFTCAGSPSPTPCGGSTADVSLGAQLLGADPYMTEHLHGWRSPFLGAPWLLVQLVVDVALCSFDEIPSHVDSHAPSHDSFRLIDL

SEQ ID NO: 82697 - protein, 38 aa, Zea mays
  Coding DNA Sequence Number=SeqID_40918
MPSKPLLVVDVVLCPFDEIPSHVDSHASSHDSFRLIDL

SEQ ID NO: 82698 - protein, 253 aa, Zea mays
  Coding DNA Sequence Number=SeqID_40919
  Subcellular localization annotation: CTP_CleavageSite=24; ConfidenceScore=5.06e-01
MAQQQIPCSELLPHAVSGHHFFTCAGSPSPTPCGRSTTVVSLGAQLLGVDPYMAEHLHGWRSPFLGAPWLLVQVSCSTSHSACSSPTRSLPWRPLLPAMAPKKIPQPSSLFPAPWLELEFPHGAPPVHGCQPLLPFAPLRSSSALHPLQWTLREIPLAPLFFPAVQLPIRLPWPPSSHGRPEIPAVSPLPRCSSWCPPDVRQNAQQAARCSSPSATPSKPLLVVDVALCPFDEIPSHVDSHAPSHDSFRLIDL

SEQ ID NO: 82699 - protein, 41 aa, Zea mays
  Coding DNA Sequence Number=SeqID_40920
MAAQQRAPFLAVLRGARRLFDKMRSKPRDAAAHLRRRQNPC

SEQ ID NO: 82700 - protein, 217 aa, Zea mays
  Coding DNA Sequence Number=SeqID_40921
  Subcellular localization annotation: CTP_CleavageSite=88; ConfidenceScore=5.25e-01
MWTHWPSTTSCRNQLQLPPGADILTPRGGLTSSAHLNTPSLPMGPLGHTTISRVTYVLGPRIRPSPTRVVTTNTAICGGALALHPGISASRRTPRLESGFVGYTSQSCAHFFFPNHRREPKLRCQEPSVVVRGGNQLIVAESCVCGPIASRGAQAGSRGCPDDESVAENSGVQQVEVAEQELIEGIRNRARSRLILVGAPTQRGAHARAKHLGRVTP

SEQ ID NO: 82701 - protein, 138 aa, Zea mays
  Coding DNA Sequence Number=SeqID_40922
MKRAISQRTGGAPDSEQYLSGVHRDCPVGQSDSLRRKAHTGRSEAVAPDCSGIRLSGAPVDRKRLLLSNGYNCGGGYKYPQPTISRSSSVETARSIREEPEAEHHLRVEKAHDSLLSYSTEVLGPRVGYPLRRGTNED

SEQ ID NO: 82702 - protein, 66 aa, Zea mays
  Coding DNA Sequence Number=SeqID_40923
  Gene Ontology: Mol. function=protein phosphatase type 2C activity; Cellular component=nucleus
  Homolog annotation: Hit_ID=Q1SGL9; Match level="QueryCoverage=80%, HitCoverage=14%, E-value=3e-12, Identity=64%"; Hit description =Protein phosphatase 2C-like
MSRAFDDYYIKDCGVISALEVTQRRTDSNDQFVILATVGVWDVLSNDETMQIVAYIKVCMLLMVAM

SEQ ID NO: 82703 - protein, 71 aa, Zea mays
  Coding DNA Sequence Number=SeqID_40924
  Gene Ontology: Mol. function=protein phosphatase type 2C activity
  Homolog annotation: Hit_ID=Q8LD08; Match level="QueryCoverage=81%, HitCoverage=20%, E-value=2e-08, Identity=42%"; Hit description =Protein phosphatase-like
MYYLADEPGVHFVWQLSQESSVLAMSHAFDDYYIKHCGVISAPEVWNVLSNDETMQIVAYIKVCMILMITM

SEQ ID NO: 82704 - protein, 86 aa, Zea mays
  Coding DNA Sequence Number=SeqID_40925
  Subcellular localization annotation: CTP_CleavageSite=24; ConfidenceScore=5.40e-01
MRSPPPSAIPTNSTSSKAPEVDVRSGGIFNAGPPLALVVAPRILDGGGQASTSLTASPSPMKGKSRLPKRMSFWETDWCRGWPSGA

SEQ ID NO: 82705 - protein, 200 aa, Zea mays
  Coding DNA Sequence Number=SeqID_40926
MEVLDLTRGSGLLIQGSGTFPWGSGATVNTSEGIVFSGHVAALEPSTWWGRVLLITRLEIAARAPHLHTVVRGTPVPGYRHSQIPNCTGATRFSWVDCNYTLRSESESVQSASKMRSPPPSAIPTNSTSSKAPEVDVRSGGIFNAGPPLALVVAPRILDGGGQASTSLTASPSPMKGKSRLPKRMSFWETDWCRGWPSGA

SEQ ID NO: 82706 - protein, 178 aa, Zea mays
  Coding DNA Sequence Number=SeqID_40927
  Gene Ontology: Mol. function=helicase activity
  Homolog annotation: Hit_ID=Q10GM7; Match level="QueryCoverage=97%, HitCoverage=11%, E-value=3e-13, Identity=29%"; Hit description =Expressed protein
MFCMGERQAILARQNKKFEANIARNVATLTEDTISDVGKMDDSTQPGSTIEINNTVQYRNTRQSAIVATNGSANMVEQGSGLEQSQSIPRFISNVDDDDEGVIFREDNDENEGYLFADEETNKDFEIDGTQNQSIATDVPDPYDKVYSNIPEETHMLKHVSDYGYCTAKKFEYEPPGF

SEQ ID NO: 82707 - protein, 486 aa, Zea mays
  Coding DNA Sequence Number=SeqID_40928
  Gene Ontology: Mol. function=helicase activity
  Homolog annotation: Hit_ID=Q1EPC6; Match level="QueryCoverage=75%, HitCoverage=24%, E-value=3e-81, Identity=44%"; Hit description=DNA helicase homolog, putative
MELYMTQQTVIEPYAVPVQMPPFPKHIFLNLDDIAELPNMTLVDIMAIVVHLDTIHRTMWGIFRKIVIMDASVSNQLTIQQYTSNRSITTPIILNIRWDIMPLANHSQTSLAISLEVIPEYTSTPFMPASTKTEDISSHNMSNETLRRKHHVLHGERQAILARQNKKFEANIARNVATLTEDTISDVGKMDDSTQPGSTIEINNTVQYRNTRQSAIVATNGSANMVEQGSGLEQSQSIPRFISNVDDDDEGVIFREDNDENEGYLFADEETNKDFEIDGTQNQSIATDVPDPYDKVYSNIPEETHMLKHVPDCGYCTAKKFEYEPPGFCCRGGKVELAPLETPPQLRRFFNGHFSFTSLYCCIDSMTTNMRDSGIYTFRAQGMMYHNIKSFGSECGAEHKHLELYFYDDDPSLEHRYHKCREDQIQKDQEVIKQIVGILHGNLYSEHLRSMGHVENLADYHIALNLDQTLNQKTYNTPLTSEVAAV

SEQ ID NO: 82708 - protein, 195 aa, Zea mays
  Coding DNA Sequence Number=SeqID_40929
  Gene Ontology: Mol. function=protein serine/threonine kinase activity; Cellular component=integral to membrane; Biological process=protein amino acid phosphorylation
  Homolog annotation: Hit_ID=Q6L4U4; Match level="QueryCoverage=96%, HitCoverage=78%, E-value=5e-29, Identity=50%"; Hit description =Putative receptor-like protein kinase
  Pfam annotation: Domain name=Pkinase_Tyr; Domain location=62-185; Score=-164.4; E_value=0.022; Accession=PF07714.7; Description =Protein tyrosine kinase
MQKMKARKESGGLVDLVHDISAKSVTTAMQRLPRFINHFVRRKKSIINSIQSSQLGAATDGFSSQNLLGEGGFGRVYKGLLEDTEEVIAVKHLNRDGLQGNGEFLVEVLMLSLLHHPNLVKLLGYSTDSNQRPCACRRTLPPGRGSATSSRRSPSSPTRNTTIPKARELSTRARIVGQTMIAVLLGLKWSGQTTT

SEQ ID NO: 82709 - protein, 280 aa, Zea mays
  Coding DNA Sequence Number=SeqID_40930
  Gene Ontology: Mol. function=protein serine/threonine kinase activity; Biological process=protein amino acid phosphorylation
  Homolog annotation: Hit_ID=Q6L4U4; Match level="QueryCoverage=24%, HitCoverage=14%, E-value=2e-22, Identity=77%"; Hit description =Putative receptor-like protein kinase
  Pfam annotation: Domain name=Ribosomal_S10; Domain location=15-83; Score=-29.9; E_value=0.027; Accession=PF00338.12; Description =Ribosomal protein S10pS20e
MHPIAPFWNHCYATRITATNHLMQDCADLVKGTKDKHLRVKIPDRIRTKVLHITTRVSPCGEGTWTLVGVGAVAQQLDEVRVVQEAEHQHLDEELAVALEIVPVQMLHGDNLFGVLEEPFVHPSEAAFSEQVLMEPAVLNRERVALDKKNRMPMLFDDYSDEDFYGVQRKYSIVARVEVKFPIEPRYRDRQHYILSDINGAKIVAIATRYEIVKYFNSLLHEKHVYKMHNVWFGLNLGALINFRHLNGTMELYFTQQTVVEPYAVPVQMSPFPKTYILEP

SEQ ID NO: 82710 - protein, 159 aa, Zea mays
  Coding DNA Sequence Number=SeqID_40931
MADFDTHGYFIGSFVMPIGYGEASEKRPPEGAPPPYLPALAGTPAAASRCLTDTGFTRAAPASTHKKTASPHYQDSSGRFPPPRIPLLTLYLTAMPLLLPPLLPRRLCAAVTPAAEQVDVEMMNDSERMFTQMSLTDDTRLASMLASIPPLRRHFASVF

SEQ ID NO: 82711 - protein, 138 aa, Zea mays
  Coding DNA Sequence Number=SeqID_40932
EASEKRPPEGAPPPYLPALAGTPAAASRCLTDTGFTRAAPASTHKKTASPHYQDSSGRFPPPRIPLLTLYLTAMPLLLPPLLPRRLCAAVTPAAEQVDVEMMNDSERMFTQMSLTDDTRLASMLASIPPLRRHFASVF

SEQ ID NO: 82712 - protein, 245 aa, Zea mays
  Coding DNA Sequence Number=SeqID_40933
  Subcellular localization annotation: CTP_CleavageSite=70; ConfidenceScore=5.19e-01
MEETHLHVFDASCPRQSTLTCAPACPAPRPSQASAVARARAYKALPSFDCTLPRTLKPHRSLARRRLPVRSVSAAAQSLCHRRPANRAIPNPVQPSEKTVHISVKLPERGIGVCFAGEASPHSPELSTPPEYVDRFSVVWPVHSPPTRTPACARGPGDSGHPRRQAVPRRDRQSLPEPTPPFAGPPSPPQIALLTRPETRSPIPVMVGTSAVTARRPVRVSEALYAKAVYLARIKTRFESSASRS

SEQ ID NO: 82713 - protein, 182 aa, Zea mays
  Coding DNA Sequence Number=SeqID_40934
MVKNFGRKTVQIAMNAVVTSHLLVCLYSAAGEQYPRTVHVDLAFAFASHLYFHLLPSRSCFMLCWHKSPKRGRLKGKCALGPFLSILVIECQRKCFCVDLCNVVDKVQIKSKVLETGKIELEMRWLCSAKVSSVWVHRTVRWCTGQCPVCQADSGELATLGTSAAVYVYKSPDCPVVHRTVW

SEQ ID NO: 82714 - protein, 114 aa, Zea mays
  Coding DNA Sequence Number=SeqID_40935
MALFGRRLKDARQNLQDGDVDLTLGIVRGRDGCPRHWGWVKGKCAFGPFLSILVIECQRKCFCVDLCNVVNKVQIMSKVLETGKIELEMRWLCSAKVSSVWVHRTVRWCIGQCP

SEQ ID NO: 82715 - protein, 118 aa, Zea mays
  Coding DNA Sequence Number=SeqID_40936
  Subcellular localization annotation: CTP_CleavageSite=40; ConfidenceScore=5.30e-01
MGKPVPSLLMLLLSRAINNFCQVITFPLVTQCSSMDQAVSLAARSRRFESSFYPCKIRAHRLGVQGLTDPDCRRAVTALVPTITGMGDHVSGRVRSKVCGQVHSGTRLTDLPYFSAYV

SEQ ID NO: 82716 - protein, 118 aa, Zea mays
  Coding DNA Sequence Number=SeqID_40937
  Subcellular localization annotation: CTP_CleavageSite=40; ConfidenceScore=5.17e-01
MGNPVPSLLMLLLSRAINNLCQVITFPLVTQCSSMDQAVSLAARSRRFESSFYPCKIRAHRLGIQCLTDPDCRRAVTALVPTITGMGDHVSGRVRSKVCGQVHSGNNMLLCEKSQKVT

SEQ ID NO: 82717 - protein, 87 aa, Zea mays
  Coding DNA Sequence Number=SeqID_40938
MARKRAKCAHGTFGLRTKLQCEEAQRLRRMAQSQSYAQENFGVITEKGTDLKGKRLFRPRWTIIELLANVKGMGVILHGLRPVPINR

SEQ ID NO: 82718 - protein, 90 aa, Zea mays
  Coding DNA Sequence Number=SeqID_40939
MQINQYPFVVPPLRTFGLRTKLQCEEAQRIRRMAQSRSYAQESFGVITEKGTNLKGKRLFRPRWTIIELLANVKGMGVILHGLRPVPINR

SEQ ID NO: 82719 - protein, 134 aa, Zea mays
  Coding DNA Sequence Number=SeqID_40940
MLNQDSIAIENPKFTPELQWSPADSQAPHGSLSCSKDMVISELSAIPFVPAPSQPEDVEEDKITQSPRRKRHKRHVSSGEKQNLVSRQNQKCQSTIGGNFATATRDREMDTNENNEIDHPTASEIDTMVILIHL

SEQ ID NO: 82720 - protein, 234 aa, Zea mays
  Coding DNA Sequence Number=SeqID_40941
MDPFQNNDVPYPLRELSSNTVEGECVDASQHCNIPINKNNSHQSTNIEDINSIHLSEVLDARERKRIRERTRFATQTTEQRALRNRESCNKKARKDYRIRQRGMLNQDSIAIENPKFTPELQWSPADSQAPHGSLSCSKDMVISELSAIPFVPAPSQPEDVEEDKITQSPRRKRHKRHVSSGEKQNLVSRQNQKFQSTIGGNFATATRDREMDTNENNEIDHPTASEIDNNGYY

SEQ ID NO: 82721 - protein, 131 aa, Zea mays
  Coding DNA Sequence Number=SeqID_40942
  Homolog annotation: Hit_ID=Q1EPC6; Match level="QueryCoverage=81%, HitCoverage=6%, E-value=7e-07, Identity=31%"; Hit description=DNA helicase homolog, putative
MLNQDSIAIENPKFTPELQWSPADSQAPHGSLSCSKDMVISELSAIPFVPAPSQPEDVEEDKITQSPRRKRHKRHVSSGEKQNLVSRQNQKFKSTIGGNFATATRDREMDTNENNEIDHPTASEIDNNGYY

SEQ ID NO: 82722 - protein, 94 aa, Zea mays
  Coding DNA Sequence Number=SeqID_40943
MVISELSAIPFVPAPSQPEDVEEDKITQSPRRKRHKRHVSSGEKQNLVSRQNQKFQSTVGGNFAIATRDREMDTNENNEIDHLTASEIDNNGYY

SEQ ID NO: 82723 - protein, 131 aa, Zea mays
  Coding DNA Sequence Number=SeqID_40944
MLNQDSIAIENPKFTPELQWSPADSQAPHGSLSCSKDMVISELSAIPFVPAPSQPEDVEEDKITQSPRRKRHKRHVSSGEKQNLVSRQNQKCQSTIGGNFATATRDREMDTNENNEIDHPTASEIDNNGYY

SEQ ID NO: 82724 - protein, 185 aa, Zea mays
  Coding DNA Sequence Number=SeqID_40945
  Gene Ontology: Mol. function=helicase activity
  Homolog annotation: Hit_ID=Q1EPC6; Match level="QueryCoverage=97%, HitCoverage=13%, E-value=1e-20, Identity=40%"; Hit description=DNA helicase homolog, putative
MVISELSAIPFVPAPSQPEDVEEDKITQSPRRKRHKRHVSSGEKQNLVSRQNQKFQSTIGGNFATATRDREMDTNENNEIDHPTASEIDNNDNHDEDILFEADDDEEEGYLFAYQDGESGEDINIDDTQDAFAVTPDVPDPYDKVYSNIPKETHLLNAVADCDYCKAKKFQYEPPGFCCRNGEST

SEQ ID NO: 82725 - protein, 1528 aa, Zea mays
  Coding DNA Sequence Number=SeqID_40946
  Gene Ontology: Mol. function=helicase activity; Biological process =viral genome replication
  Homolog annotation: Hit_ID=Q1EPC6; Match level="QueryCoverage=94%, HitCoverage=98%, E-value=0.0, Identity=62%"; Hit description=DNA helicase homolog, putative
  Pfam annotation: Domain name=DUF889; Domain location=1281-1508; Score= 332.4; E_value=7.6e-97; Accession=PF05970.5; Description=Eukaryotic protein of unknown function (DUF889)
MDPFQNNDVPYPLRELSSNTVEEVLDARERKRIRERTRFATQTTEQRALRNRESCNKKARKDYRIRQRGMLNQDSIAIENPKFTPELQWSPADSQAPHGSLSCSKDMVISELSAIPFVPAPSQPEDVEEDKITQSPRRKRHKRHVSSGEKQNLVSRQNQKFQSTIGGNFATATRDREMDTNENNEIDHPTASEIDNNDNHDEDILFEADDDEEEGYLFAYQDGESGEDINIDDTQDAFAVTPDVPDPYDKVYSNIPKETHLLNAVADCDYCKAKKFQYEPPGFCCRNGQIDLAPFETPSQLRRLWGCADADARHFRDNIRFFNDYFSFTSLYCCLDSMTTNMDCGIYMFRAHGMMYHNLRSFGREVGAEHKHLELYFYDDDPSLEHRYRKCRQEQLEKDKAVIKQLVEILKGNPYSEHLRSMGHVDNIEDYHIALNLDQTLNQKLYNVPITSEVAAVWIEGSERRGQFSNSVMLHGKDRSSHGIRSYHGCYDALSYPLFFPKGELGWHANIPKSNVSMDEVDAYRDQHRRSDANNDDTERPSHLCVSVRDYYCYRFQIRPSIFNPILHGKRLFQQFAVDTYIKIESSRLDFIRKNQDRLRADLYKGLVDSLHEGENRADKIGKRTVLSTSFIGGPRDMRRRYMDAMALVRKFGKPDIFLTMTCNPNWDEITRELLPMQSPQDRPDLVVRIFRAKLEELKKRLTKHDILGKIRAYVYVVEFQKRGLPHVHFLLIMQRKYKLTCPDQYDLLISAEMPDKKKYPELYKMVIKHMMHGPCGLLNPKCPCTKGRASCKNHYPRAFSNATSQGKDSYPIYRRRDDGRKETVRGCELDNRWVVPYNPYLLRLFNCHINVEACGSIKAVKYLFKYIYKGHDRASVAVTDANKADGDVDEIKQYRDARWVTPPEALWRIFSFDLSQNSPPVMQLQLHLENMHMVSFHERAKVNHVVQCLGADRSMLTAYFEANRLHEEARGILYRDFPEWYTLQQGKVWQRRKRNTGGQVGRIVSAYPAEGERFYLRLLLNHVTGATSYADLRTVDALRRLFATILVYCEPNDVAELWQRHLDSMSEDYHRSTQSKTHVQQMVLIDIRNILQSMGKDIKTFPLPAIIDKYDDSHGTDREIYEEESIEPTAEDVAMKETLNEEQRSAYDKILSVVDTNNGGVFFVDGPGGTGKTYLYKALLAALRSQDKIAVATTTSGVAASILPGGRTAHSRFKIPLTIDDGAVCSFTKQSGTAKLLQKASLIIWDEASMTKRQAIEALDNSMRDIMGRPELPFGGRTVVFGGDFRQVLPVVRKGSRAQIVAASLRSSYLWESMCHLKLVQNMRAQSDPWFAEYLLRVGGGTEEANNDGDVRLPDEVCVPYTGNDRDLDRLIDDIYPNLNENMSNTSYITSRAILSTRNDWVDMINMRMIDRFQGEQMMYHSFDTAVDDPNNYYPSEFLNTLTPNGLPPHVLKLKVGCPIMLLRNIDPANGLLQWHEVGVNKAQGQTIPNVGVYLPEPVFSHGQLYVALSRATARSKVKILAISSPR

SEQ ID NO: 82726 - protein, 98 aa, Zea mays
  Coding DNA Sequence Number=SeqID_40947
  Gene Ontology: Mol. function=peptidyl-prolyl cis-trans isomerase activity; Cellular component=membrane; Biological process=protein folding
  Homolog annotation: Hit_ID=Q8LDP4; Match level="QueryCoverage=55%, HitCoverage=22%, E-value=3e-12, Identity=67%"; Hit description =Peptidyl-prolyl cis-trans isomerase CYP19-4 precursor
MTKMYIHKRQDIICDVFRLQAKKDLMEVTHKVYFDVEIDGKPAVLRKSSAAFIGRIVMGFFGKTVPKTAENFRVTVGPAYDRNGSNNRNVSKKAQRGR

SEQ ID NO: 82727 - protein, 167 aa, Zea mays
  Coding DNA Sequence Number=SeqID_40948
  Homolog annotation: Hit_ID=Q8LDP4; Match level="QueryCoverage=30%, HitCoverage=20%, E-value=2e-09, Identity=64%"; Hit description =Peptidyl-prolyl cis-trans isomerase CYP19-4 precursor
MTKMYIHKRQDIICDVFRLQAKKDLTEVTHKVYFDVEIDSKPAVLRKSSAAFIGRIVMGLFGKTVPKTAGFLDCFYLSLERQEWKHTSYCWPSIRQEWKQQQEWKQEGTERQRLYLESAMPEAKSWPSPVLSAEPPNIFLATCLVAEDPPFESGVGDLARYIEVHSL

SEQ ID NO: 82728 - protein, 385 aa, Zea mays
  Coding DNA Sequence Number=SeqID_40949
  Gene Ontology: Mol. function=helicase activity
  Homolog annotation: Hit_ID=Q5JMT3; Match level="QueryCoverage=73%, HitCoverage=53%, E-value=1e-55, Identity=37%"; Hit description=DNA binding protein-like
MSTSAECRMYKPVDNDIMIGFTKWTTVEELIEVPPAFPELVYSLTPFDQLTTLVDIREYFIDVIGAVTMISDVATIRTKMRQTQTAKRSVTIQNESCTPLEVVLWGEQATSFPADQISIAGQDSLQIIIFVGTLARSYAGTTSLTGGSSCKCLQHKRSPIMAAAGSTQHVPRISTAEHKKKVEWLVTVTVLKIDQLWWYESCRKCLKKTKPHGDAYKCSDSGCGHVGPPNPRYRLLITAGDEIGETDFILFGRMAQRIVKKPLDILIADNPAGFIPDEITRLMEKVYTFNVNTVVAEIGDGGQVPISPSGSQPSSISSARAASKSTSADSVPTGGTSSQTPQSTKSYSKDKTMHFDVACKVANATLKRWVLSYQAGCEEDIGRLS

SEQ ID NO: 82729 - protein, 440 aa, Zea mays
  Coding DNA Sequence Number=SeqID_40950
  Gene Ontology: Mol. function=helicase activity; Biological process =viral genome replication
  Homolog annotation: Hit_ID=Q6YTQ6; Match level="QueryCoverage=65%, HitCoverage=49%, E-value=6e-69, Identity=50%"; Hit description =Helicase-like protein
  Pfam annotation: Domain name=DUF889; Domain location=173-348; Score= -18.9; E_value=3.2e-10; Accession=PF05970.5; Description=Eukaryotic protein of unknown function (DUF889)
MKVAEFITDIREGKTFGPVLVALYTVEFQKRGLPHIHCLVWLANRSFDLDASTIDGFIYAEVPDFMTDPLGYAFVDEFMMHDPCGVASLLMPKGRTAHSRIKIPFDMNETAMCTIKRGTMLAELIQVSSLIVWDEVPMTHRHFFEALDRTMRDILSEDEPANVIIPFGGKVVVLGGDFHQILPVVRKGSRYAIVNACITNSRLWRHVSFLSLHTNMRLANPCLPSKKRAALAEFSKWVLSIGDCTIPVEKMDDEAEPSWIMIPPDLLIHDDGDKILALITECQRVLRCIILTGSRIGDEMAEVLIGSLMIGNCSDRLCIRVSRMWEFYDPQDESKLLHADMVLIDEEGGSAHAQIYPPLAVVFKPMIKEGNVYRVSYVQIKKANRMYKHVDNDIMIGFTKWMTVEALIEVPPAFPELVYSLTPFDQLTTLVDIREYFIGT

SEQ ID NO: 82730 - protein, 176 aa, Zea mays
  Coding DNA Sequence Number=SeqID_40951
MRPETGSPHASYGGYKCGHCTAAAGVSGALYAKAVRPGRERGIDGDGYHVWGRSTLTCRTMQEMVDGVTWPTTAGHTEWDRLLPQRIGEGVYPLRQPVAFPPRSRRYKSWTGPRRTAPPCTSKSSSRAASLLCWFARAPLVSAPPSVRVPSYSEAWKEDDLVNVRSGSCGWGIDLE

SEQ ID NO: 82731 - protein, 144 aa, Zea mays
  Coding DNA Sequence Number=SeqID_40952
MVGTSAVTARRQPGSVEHCMPRRSLSIAPTCGFPAAIAPLQVVDRAAADRTAVYLEIFLQGGVAFVLVRQGAAGQRTAVCAGAVVLRALEGRRSRERPIRIVRMGIDLGLVQGGPSIVSLKAQICCKVPLSLNLIATIEMSSDG

SEQ ID NO: 82732 - protein, 71 aa, Zea mays
  Coding DNA Sequence Number=SeqID_40953
MGTPSGGFFAECYQADTRQRYLLCRVSPGTLGKEACFVECHIKHSAKYLTWGPPLADSLPSAIRQTLGKGI

SEQ ID NO: 82733 - protein, 243 aa, Zea mays
  Coding DNA Sequence Number=SeqID_40954
MVEPYRPLHARIPSRHSLPPYVATFYTGVVGPAVTDKLYKVRARSTGSSPAIRPRHDSSQHCIQQLETQLEEERRERQEMEERIMAEREAADQRMAEMFQYMQRLDAAQGFAPPPPLFPAVDPALIHTPGKQIKKVCTGHFAECYTRQSTSLPSVRTITLGKEPRPGHRYRFFAECNGSGTRQRSTLCRVPYQALGKVPDMGTTLADSLLSAVRQTLGKDVVSVNRRRNDCFSLPSVLWHSTK

SEQ ID NO: 82734 - protein, 233 aa, Zea mays
  Coding DNA Sequence Number=SeqID_40955
IFPSRKGIRDLICAIHPLINGHRDTAPLHQTPTGGAARQRDGAMAGHGDHASYRSKPDNSSPTRCPVKSESTRGSLTKNGGAAEANHGAARIRGDPNRRQAIAEAKCRHKTRPPPEHVPCGHTKLWDPAPGHHSPVPPSSTRRAPQSLSRLGEVLCSRQWCEKKMALVLRRDGCLGPVLETVVVGVARESPNGVRFFRRPERFGATHAREEEQGRVADAEGPPVIGARERAAG

SEQ ID NO: 82735 - protein, 138 aa, Zea mays
  Coding DNA Sequence Number=SeqID_40956
  Subcellular localization annotation: CTP_CleavageSite=24; ConfidenceScore=5.61e-01
MGRHTSISARSNFPSAQPNLPQHRAPTPGSRLSVAGFRAFDAHCRAGPTELRRGSWVLRQPAIPLSVPQGACNCSLVLVGSGGAPCVVDIQAISALSGCMIVVAGHGAVVLPGSTAGRSLVKGSGIAVAVDQGMNGTD

SEQ ID NO: 82736 - protein, 184 aa, Zea mays
  Coding DNA Sequence Number=SeqID_40957
MGGPAEQQKTDERHAVTRSSSGDDDDFCSGGPNSGSDDLRADAAAGRPPPMPKLLRQGQAEGRRVGGPPPTARGLGPTRHASRPRAEEAKPPRAVHATAQRLQATLHFCPDQRAKGRAAMQAACNRAKWAHLSDFQRAQHGSRGPRVMQPAHRMLRASNCTVTRATATPPRLRNQYRDSRQPYA

SEQ ID NO: 82737 - protein, 209 aa, Zea mays
  Coding DNA Sequence Number=SeqID_40958
  Homolog annotation: Hit_ID=Q6QP51; Match level="QueryCoverage=30%, HitCoverage=35%, E-value=6e-13, Identity=64%"; Hit description =Putative growth-regulating factor 1
  Subcellular localization annotation: CTP_CleavageSite=22; ConfidenceScore=5.01e-01
MQAACNRAKWAHLSDFQHAHASCNRRAGRYVQATAPPLAPLSCLLESEPVPRLEATQQRQLGATVNAAKNGPTVMAVAGGSSGHVVSQAYVPSWGSGASGRGSERRFAFAIMTTSKKGLGKGDTPKRTLLREGNRLRASLLIRGSKAGPSEGFNSRLRPRGLHTHYWSEVRRLAPRKGSTAASGHSGSAPTTDQGFEGWPSKGSQSPQT

SEQ ID NO: 82738 - protein, 256 aa, Zea mays
  Coding DNA Sequence Number=SeqID_40959
MGHNAGRTPLIDISNTSVTGDQIGSNSLGPIDDANERKRQRDRERYATMSIEQKNEKNRKRREARQRNTGLPLKSESSRGPIKNTPLAGNSIERKRQRDRERRATMSVEQRNEYNNKRRQMRRRNKGQNVMPDVSGDGDNKVNVDLDDDSDWLHRNETFQTNDYVATTDLLSPGSVHESVGVIGEPSIGVREYRLERLRLYNQTPKRKEAKIEYMRKRRVLQADTLNVASIAMEDPTYTPEVVHPATEPSTVTTCD

SEQ ID NO: 82739 - protein, 1849 aa, Zea mays
  Coding DNA Sequence Number=SeqID_40960
  Gene Ontology: Mol. function=helicase activity; Biological process =viral genome replication
  Homolog annotation: Hit_ID=Q1EPC6; Match level="QueryCoverage=86%, HitCoverage=98%, E-value=0.0, Identity=69%"; Hit description=DNA helicase homolog, putative
  Pfam annotation: Domain name=DUF889; Domain location=1420-1656; Score= 457.4; E_value=1.8e-134; Accession=PF05970.5; Description=Eukaryotic protein of unknown function (DUF889)
  Pfam annotation: Domain name=Proteasome; Domain location=1689-1843; Score=76.4; E_value=9.2e-20; Accession=PF00227.16; Description =Proteasome A-type and B-type
  Pfam module annotation: Pfam domain module=DUF889::Proteasome; Domain location=1420-1656::1689-1843
MSIEQKNEKNRKRREARQRNKGLPLKSESSRDGDKKENVDPDDDSDWLHRNETFQSNDYVATTDLLPPGSVHESVGVIGEPSIGVREYRLERLRLYNQTPKRKEAKIEYMRKRRVLHADTLNVASIAMEDPTYTPEVVHPATEPSTVTTCDWVIPEFIRTPFLPAQTQTEDVGSFDMSTEAIRHKHHVPRGERQAILARRNKQFQASIARNVTTLNGDTIGDANNNGNYYPILNGSCTTTIPYSQTNRVFPSAQCSVPCQAATLPTNGSEGITEQGNEVEHTQEKPTVISNDDDDDDEAVIFEEDDDNDEGYIFAGQCTYVNFYYDYDTKAYINTHVLVVVFQKISDEETDEDIEIDGTQDESTGTDVPDPYDKVYSNLPEETHMLKPVPDCGYCTAKKFEYEPPGFCCRGGKVELAPLDTPPQLRRLWDSADSDAKHFRDNIRFFNGHFSFTSLYCCLDSMTTNVRDSGIYTFRAQGMMYHNIKSFGKEGGSEHKHLELYFYDDDPSLEHRYRKCREEQLQKDKDVIKQIVGILHGNPYSEHLRSMGHVENLDDYHIALNLDQTLNQKTYNTPLTSEVAVVWIEGSERRGQFSKSVMLHGKDRSSHGIRSYHGCYDALSYPLFFPKGELGWHANIPKVGVSMDEVDAYRATHRANNSNDEDAESPTHLCVSVRDYYCYKFQIRPGVFNPILHGKRLFQQFAVDTYIKIESSRLDFIRKNQDRLRADLYQGLVDSMLDGDIRAEKVGKRTVLSTSFIGGPRDMKRRYMDAMALVRKFGKPDIFLTMTCNPNWDEIRRELLPGQTPQDRPDLVVRVFHAKLQELKHRLTKQDILGKVRAYVYVVEFQKRGLPHAHFLLIMQRKYKLTCPEQYDLLISAEIPHNKYPELRKMVIKHMMHGPCGSLNPNCPCTKGHVSCKNHYPRPFSDTTLQGKDSYPIYRRRDDGRKEKVRGCELDNRWVVPYNPYLLRLFNCHINVEACGSIKAVKYLFKYIYKGHDRASVVMRDASKADDDVDEIKQYRDARWVTPPEALWRIYGFELSQNSPPVMQLQLHLPNMHMVAFHERQMVELVVNRPGADRSMLTAYFEANRLHEGARGILYRDFPEWYTWQSGKGKVWQRRKRDTGGQVGRIVSAHPAEGERYYLRVLLNHVTCATSYVDLRTVDGVPLPTFREAAERRGLLESDNTLDDCLTERALFQMPSALRRLFATILVYCEPSDVAVLWQNHLDVMSEDYQHRSQGKTHVEQMVLIDIRNMLQSMGKDIKTFPLPPIIDAYDDAIGTAREVYEEESIEPAVGDVALKDSLNEEQRVAYDKILSAVDTDKGGLFFVDGPGGTGKTYLYRVLLATLRSQGKIAVATATSGVAASIMPGGRTAHSRFKIPLTIDDGAASMTKRQAVEALDNSMRDIMGRPELPFGGKTIVFGGDFRQVLPVVRKGSRAQVVASSLRMSYLWESMSHLKLVSNMRAKNDPWFAEYLLRVGGGTEDTNSDGDICLPDEVCVPYSGSDNDLDNLIDFVFPNLNENMSDSTYITSRAILSTRNDWVDMINAKMIDRFQGEHMLYHSFDSAMDDPHNYYPPEFLNTLTPNGLPPHVLKLKIGCPIILLRNIDPANGLCNGTRLVIRGFQRNSIDAEIVLGQHAGKRIFLPRIPLCPSDEEMFPFQFKRKQFPVRLSFAMTVNKAQGQTIPNVGVYLPEPVFSHGQLYVALSRAIARSNIKILAIPTVDGKKRSRKASTHLKMNPLKPSMGAEKQMYGQPSGVRPFGVSLLIAGYDDNGPQLYQVDPSGSYFSWKASAMGKNVSNAKTFLGKRYTEDIELDDAIHTAILTLKEGYEGQISSNNIEIGIIRADREF

SEQ ID NO: 82740 - protein, 92 aa, Zea mays
  Coding DNA Sequence Number=SeqID_40961
MTGKKTTASSDGGTPKKAKVVVEDEEEAGLEDEEEATVTLSVEKDALECDIQSEVFMASQITMHCKNGHSRCAKCCIRTDGSRVKLHASVCH

SEQ ID NO: 82741 - protein, 102 aa, Zea mays
  Coding DNA Sequence Number=SeqID_40962
MTGKKTTASSDGGTPKKAKVVVEDEEEAGLEDEEEATVTLSVEKDALQCDIQSEVFMASQITMHVYIQYILIGRLQHDALLCVKSVQERAFWMCKVLHPHGR

SEQ ID NO: 82742 - protein, 88 aa, Zea mays
  Coding DNA Sequence Number=SeqID_40963
  Subcellular localization annotation: CTP_CleavageSite=55; ConfidenceScore=5.32e-01
MAQLQVAARCLLAPWQGKRPIFKRRSPVVPTNLQQRAERKVIVQASACKVSAAVRLQAAARGLLVWWRPQEVWRQMLEAALVVVDLST

SEQ ID NO: 82743 - protein, 261 aa, Zea mays
  Coding DNA Sequence Number=SeqID_40964
MTLECLNAKLDASLTIITNNFATLTTTPATTGAVTSPDWCQCPRTNRAAPLPQLHATITITNSIVRPLINDGTGIHDDNVSFTRPRRSPPPMPVPPQQHYNDVFLRGVWDGIRASMAQLQVAARCLLSALARKASHLQTAEPSRPNKLAAARGEEGDCAGECLQGVCSGAAAGCGAWPPSVVAAAGGVAADARGSLGGDGVHGIQVAAHVQVQCAEGVKFVSSGVIVSIIVRLHLEDELHVQVGCSVREALRGTVPRLDQI

SEQ ID NO: 82744 - protein, 220 aa, Zea mays
  Coding DNA Sequence Number=SeqID_40965
  Subcellular localization annotation: CTP_CleavageSite=30; ConfidenceScore=5.52e-01
MSSPFLMHRVFPPSKPPDGGNPPYFRLIVGGTQLRGSWHLSATVRLQGFSSASPAAPPRRRSPKMVTTSSWVGRSKPGCDLGPTLSFRAGGGEPLVSLLLLRRPTPIEWGYSPVDYLNRFTKHESPRVKVTSEPGCPSAGPTPESISRGLGSGWRPWKMVGRGPGGDRPSRLLGPDSRRSPWTVSPSEAGSDLAEGVVDAEGATAPFQREDPSLQGQIVL

SEQ ID NO: 82745 - protein, 410 aa, Zea mays
  Coding DNA Sequence Number=SeqID_40966
  Homolog annotation: Hit_ID=Q6QP54; Match level="QueryCoverage=22%, HitCoverage=45%, E-value=3e-25, Identity=56%"; Hit description =Putative kinase
MRRKDSGFPPSGGLEGEKTRCISAPDAACKQLHRHLRHHRASSVAEPIPRLEAAQRTTQQRQPGATVNAAESGPAVMTVAGGREQRSRRRPGSRPIQGQQESLLSRREDDTPVIRPSNGSRTRNGRPANHSPRRINSATGQAAPLAGEAGDASPSPDRERGIPRKGSFPVKEPGSEPPLLIRGSKAGPLRGSIAASDRVGPTPTTGQRLAPEGFTVASDAERGMTRGDRVRQITRRYFWACLWAPSRPPTNGARTSTRITRLQLTGDTMFGAHQGARTRAKPRKTANSAPPDPRLGLGLGPGRRRTPLRPTQGSDSGSTPEDDGLRFARPQGSDSALASTERPPPRPTQGLGLGLGHGRQTRPRLRRSLHVARPRAQASHVNRKRHHHPIPSRLGPQRTRPVSHLASSAR

SEQ ID NO: 82746 - protein, 181 aa, Zea mays
  Coding DNA Sequence Number=SeqID_40967
MACYPLANQHPPLLCQRNLYYLLRSATFDQIDSAYREAGGDPFVAASILSSTQDMHPPQPPAATGSLAAQWIWWKKGWSEAQAGLRWPLRGMVADVIGKEYTRSTANSVVSMPNAWKGRDRESDGDGSGGRKDSVEETEQFLCSMLGDNSELGMGVVRDVPAGVNDIGCMVLDEQAIPGGS

SEQ ID NO: 82747 - protein, 172 aa, Zea mays
  Coding DNA Sequence Number=SeqID_40968
  Homolog annotation: Hit_ID=Q6E4A5; Match level="QueryCoverage=44%, HitCoverage=42%, E-value=2e-12, Identity=66%"; Hit description =Putative PRLI-interacting factor N
  Subcellular localization annotation: CTP_CleavageSite=21; ConfidenceScore=5.16e-01
MVVFCDRAGAGNAHRQRSSSSAFSLSACNKTTTIAEPQRKHDGWRLARFLPPSPVLQQLVRLACGLHAVEVEQLVSLGPPSVLAWLLDTFASATFDQIDSAYREAGGDPFVAASILSSTQDMHPPQPPAATGSLAAQWIWWKKGWSEAQVGCGGRYGHGRGRDWQGVHTIHG

SEQ ID NO: 82748 - protein, 112 aa, Zea mays
  Coding DNA Sequence Number=SeqID_40969
MRGGIGAYAKISEDEPRHTRMRLNALLLLCLCAFPASARSQNTTMAMAAPASVEGFNCTANRTYPCQAYALYRAGFAGVPLDLAAIDDLFAVSRFMVAHTNNLSTTAAPANG

SEQ ID NO: 82749 - protein, 178 aa, Zea mays
  Coding DNA Sequence Number=SeqID_40970
  Gene Ontology: Mol. function=protein-tyrosine kinase activity; Cellular component=integral to membrane; Biological process=protein amino acid phosphorylation
  Homolog annotation: Hit_ID=Q70KR3; Match level="QueryCoverage=89%, HitCoverage=27%, E-value=2e-18, Identity=36%"; Hit description=SYM10 protein
  Pfam annotation: Domain name=LysM; Domain location=92-138; Score =15.0; E_value=0.015; Accession=PF01476.10; Description=LysM domain
MATAAPTSVEGFNCTANRTYPCQAYALYRAGFAGVPLDLAAIGDLFAVSRFMVAHANSLSTTVAPANGQPLLVPLQCGCPSRSPSSYAPMQYQIGLGDTYWIISTTKLQNLTQYQAVERVNPTLVPTDLDVGTMVTFPVFCQCPAAAADNATTLVTYVMQPGDTYVSVVAAFSVAYPQ

SEQ ID NO: 82750 - protein, 145 aa, Zea mays
  Coding DNA Sequence Number=SeqID_40971
  Subcellular localization annotation: CTP_CleavageSite=52; ConfidenceScore=5.30e-01
MAAAGGWGALLLARTRGHCSRLLGGRSLPRPPARDPAGRRAARKGTPWRSCSCALGRRSEEGEGAVERGGARPWQQQGGAHGINRRERASTIGGVGGIAAELWHVSLLAGHNFVLLLMVLSAGGLGLLISLSNSSILLIEDGHLS

SEQ ID NO: 82751 - protein, 52 aa, Zea mays
  Coding DNA Sequence Number=SeqID_40972
MARVACTLRGKRLDGGHNFVLLLMVLSAGGGLGLLISLSNSFILLIEDGHLS

SEQ ID NO: 82752 - protein, 110 aa, Zea mays
  Coding DNA Sequence Number=SeqID_40973
MGFAPIPAVTEPHKVLGPPTVVLVLRTLDNLVDAHNHSTSSVGGKHPPATNFTVGALPWVPPLNRNSKTLLLSHLQQHGFENPEYGVYFRKSYPTKEKDSQGYAGLRESR

SEQ ID NO: 82753 - protein, 141 aa, Zea mays
  Coding DNA Sequence Number=SeqID_40974
MGLKTLSTECTFASLTRQRKKTSQGYAGLWDSRHFAYTSHLLSPLEFTGLLRYKEKKKGDGEELALYSQNQLEPGTPDCPVVHRIVSGAPGCSTVNLLLLGIGRATWLKFTELSSESSAPAPEVFGYKLVALRNSPRTPRL

SEQ ID NO: 82754 - protein, 74 aa, Zea mays
  Coding DNA Sequence Number=SeqID_40975
MAGGRELAGAKEGRLAGEGSLAPMSTEKRHLDQIILLALRLLLNHMFFSCGGCETARVSSHTFIAQQVVGNNVA

SEQ ID NO: 82755 - protein, 305 aa, Zea mays
  Coding DNA Sequence Number=SeqID_40976
MSSHTFIAQQVMGNNVYELAKGGSSCEVTVIAAKSSRGPPYTDHSPTALAPFGLRNPRVGRRVLISKTVRVLLQNPHREGVSSRQSRWILSGRPRSDRTFVSNRYTTRVVDREIDGRDLMKPCAIGTDGSKMYGTDRTLCKRWVCPITTVDSPIYGRRTVFLFSQYRVTADGQGGGAITGELPGTPGRLYVQRDSMRNEEGKVASTEVGTLPGIRSPGGSPTAHGGSLRVNDDGEQFGPLPRPTPLGSPAESSTVNPRRSPTQLQLTRGPDAKMVVRPPLSSLFSLLTAMVALDRSGGRARGKWR

SEQ ID NO: 82756 - protein, 96 aa, Zea mays
  Coding DNA Sequence Number=SeqID_40977
  Homolog annotation: Hit_ID=Q5ZAV7; Match level="QueryCoverage=74%, HitCoverage=26%, E-value=3e-07, Identity=45%"; Hit description =Universal stress protein-like
MGSCGFGASRKGSKGRLGSVSDYCVHHCVCPVVVVRYPDDAADAGGDASGVTDESTTTPSYGEQMVVHHGHDYDWRSQPIDLETTYASTRGQTHGQ

SEQ ID NO: 82757 - protein, 73 aa, Zea mays
  Coding DNA Sequence Number=SeqID_40978
MGDHVSGRVRRAICGQVHSGIRMLILIPFSSRRPRIPMDPCPQTIIILLSKWIQPIPDLARVLEKSLDFYRDP

SEQ ID NO: 82758 - protein, 74 aa, Zea mays
  Coding DNA Sequence Number=SeqID_40979
MGKPVPSLLMLLLSRVTALVPTITGMGDHVSSRVRRAICGQVHSGIRTLILIPISSRRPRIPMDSCPQTNISMI

SEQ ID NO: 82759 - protein, 390 aa, Zea mays
  Coding DNA Sequence Number=SeqID_40980
  Homolog annotation: Hit_ID=Q8RV35; Match level="QueryCoverage=43%, HitCoverage=59%, E-value=3e-16, Identity=36%"; Hit description =Putative OsNAC protein
MGCRGDTQIRVMIGPIHHHHLEIGDRWHMAANDHVFRATNEASVALLRSLRAGTVDQRFKVFIHHADVYTAAPEELVAGLEPVPGTDVTEDGYNRQWYIYCPKRYKNGEGRTSGHRLRAVETAGTCWHSETGPKSMQGLPGATVCSLSYGHKEKEDGTSGRHRFHRMGWRMFEYDDTQGGGGDHVLCKVHRSSSSLAKNKSKAKRTATGDHPEAPPTKVIHDVQVQMQDPAGAIFTCAYPTMDDPLLMVRGEEASEAEHGGDLGKFNIGGLLLNIDNVDWKTLLDNVDGEQQQQQPCTEPAKQSSVQVQVDPAATLMPSNVHGHEQGRDSMMVGGEEEQRRRIEEQVSVDDLLDVNNVDWKALLDMLEDDEEQGLPLQQQPCAEPAAEQS

SEQ ID NO: 82760 - protein, 293 aa, Zea mays
  Coding DNA Sequence Number=SeqID_40981
  Gene Ontology: Mol. function=DNA binding; Biological process =regulation of transcription
  Homolog annotation: Hit_ID=Q8RV35; Match level="QueryCoverage=57%, HitCoverage=59%, E-value=3e-16, Identity=36%"; Hit description =Putative OsNAC protein
MAANDHVFRATNEASVALLRSLRAGTVDQRFKVFIHHADVYTAAPEELVAGLEPVPGTDVTEDGYNRQWYIYCPKRYKNGEGRTSGHRLRAVEIAGTCWHSETGPKSMQGLPGATVCSLSYGHKEKEDGTSGRHRFHRMGWRMFEYDDTQGGGGDHVLCKVHRSSSSLAKNKSKAKRTATGDHPEAPPTKVIHDVQVQMQDPAGAIFTCAYPTMDDPLLMVRGEEASEAEHGGDLGKFNIGGLLLNIDNVDWKTLLDNVDGEQQQQQPCTEPAKQALQVQVDPAATLMPTNSS

SEQ ID NO: 82761 - protein, 236 aa, Zea mays
  Coding DNA Sequence Number=SeqID_40982
  Homolog annotation: Hit_ID=Q6QP51; Match level="QueryCoverage=22%, HitCoverage=24%, E-value=1e-19, Identity=87%"; Hit description =Putative growth-regulating factor 1
MKILEAERRLESADPHGVALLQQQQEEGNTEPAQRLKAALRVTQQCPLSAMITGHSAAEGKRHLRQAKRVLFHLRHDDRAKKGTGKGDIAKRILLGEGNGPRALRLIRGSKVAPSGVRQPPQSTRAPSPLLIRGSKAGPSEGFDSRPRACRVRDDPGYVRYMAEAWVTLPRYPRTFPRPAETICNGIPPEGGTEPSDPIEWVRVQQITCRGSRAALVPGYGQTVDHVNKPAKKLGA

SEQ ID NO: 82762 - protein, 79 aa, Zea mays
  Coding DNA Sequence Number=SeqID_40983
MERHSVPTHINRPHRFPASREGLTALAYNASLTPTAVVKQRIPMDHCPQTIIRTIYKWIQPIPDLARVLEKSLDFYRDP

SEQ ID NO: 82763 - protein, 78 aa, Zea mays
  Coding DNA Sequence Number=SeqID_40984
MDTSMLGRVGALLIRDLGRSRVIFLALVRGQELVYPILYRNDDGSLEDMVARVTWPSTLPPGWTVEWDPASAEEEHEE

SEQ ID NO: 82764 - protein, 190 aa, Zea mays
  Coding DNA Sequence Number=SeqID_40985
MTRVPDFCAPDCALWRAFNVPAGGSGHGENKHLRPESRMKGAGAKEGDAGNLDAVTAGRSTSRGGVLPRAPRGLLLREGEGAESSAATMAGPWSRGRRHGSFCSCAREAREEGTMDRSSAGACPREGEGAPALACVKEPAASCAPAIEEKLLLAAVWEKEAEGCGGCKRIGVGVKNGQGQGKGSIFIDTC

SEQ ID NO: 82765 - protein, 156 aa, Zea mays
  Coding DNA Sequence Number=SeqID_40986
MEQGGALFGRSDGGWSSGVVDLGHVMGLVLARRESSAPWLLAGALVEEELCLGRHLPRGGRAGEGRLAMELLLGLGAMAEGAWNRQPAGGCRCRKAGRKKGAVGLPAARGRRSRELGGHHGWAVEQRETQGPMAMWREEPSFWFQQGRTWGGGCHG

SEQ ID NO: 82766 - protein, 361 aa, Zea mays
  Coding DNA Sequence Number=SeqID_40987
  Homolog annotation: Hit_ID=Q6QP51; Match level="QueryCoverage=58%, HitCoverage=86%, E-value=4e-21, Identity=41%"; Hit description =Putative growth-regulating factor 1
MSTARGIDPFLKAALPTRIPSVGSKVSTDELQGNHPAVISVPPFSSKPAGERADRHAGGVQPHHGCAPFRLYRIRWISVKAWARMSRNRRNSYCVQETAPPLTLMPRLLDCGTSTATRGSPAHDPTVPIEHNDHRLAPRKGSTAAPEHSGSAPTTDEGFEGWPLGRVRQPPQSAQAPRPLLIRGSKAGPSEGFDSHPRARRVRDDYGSDFVTESHQREASSPRTLSNGSGSSKSPAGFVEKQPWPNRLSNRPYRRNIQCEDRLTPYPDTHALVGKVEENNVARPAPTTVPPTRVRMTTAKFSLGRNRKLRLARPQGSASTSASGGIASLPDPGLSLRRSLRLARPWALTDRATGDTSLPYP

SEQ ID NO: 82767 - protein, 212 aa, Zea mays
  Coding DNA Sequence Number=SeqID_40988
  Homolog annotation: Hit_ID=Q10Q09; Match level="QueryCoverage=46%, HitCoverage=19%, E-value=2e-47, Identity=91%"; Hit description =Diphosphonucleotide phosphatase 1, putative, expressed
MKHNEFTARTELKSLTQLIKCAKTECGRLRMLKLYAAVESQERPVHRDWSGAPDTVRCTTGQSGLEDLEPRLLSRKWNVDQLVKTLWPQQSGVNDIRPAEVDGSNESNDFEPVVATKEIGLDQDLSMEILIQVVNAGYQLRICSTCQQKTVSSSGTEQYRFIEHCLSSVDRQKQPWLIFLAHRVLGYSSATFYADEGTTEEPMGHECLQPLW

SEQ ID NO: 82768 - protein, 96 aa, Zea mays
  Coding DNA Sequence Number=SeqID_40989
  Gene Ontology: Mol. function=hydrolase activity; Cellular component =chloroplast
  Homolog annotation: Hit_ID=Q10Q09; Match level="QueryCoverage=52%, HitCoverage=12%, E-value=7e-17, Identity=56%"; Hit description =Diphosphonucleotide phosphatase 1, putative, expressed
MACKPALKLFVDGAELCITVHLESYSIFQPFSVRSSHRTSAYNSRYSTDYGMFRFCKQPWLIFLAHRVLGYSSATFYADEGTTEEPMGHECLQPLW

SEQ ID NO: 82769 - protein, 111 aa, Zea mays
  Coding DNA Sequence Number=SeqID_40990
MAHQSFSDTPETFSQPFYPLYPWIHGLFPSTEFAVAPSSPLPNSSYPGATLAHACLNSGDLTTADRSGAARNRLFPDNEQLVVPECVAEDPSKQQPGEGKCPLTYYVLHTL

SEQ ID NO: 82770 - protein, 289 aa, Zea mays
  Coding DNA Sequence Number=SeqID_40991
MCVGRRPTQQGIESVVEVTPASGVTSDGSRDPSLRLWLLRELRAMARTATGIVVVSISVRVSSSSRDALRWCRGHLWLRCRGRRPLKLHLLLGQGGRVLLLLLLLLASALLLLMQATMQSLQKPTAEIRSTTEGARAGGRALTCGTGSVSNRGGERADRAGPAPEGKHTTTGVRGGSEPFDRDRTKGVRRGSKEGPMGSKGVRAVRSRSDGGNQTGKDERLRATLIGGIGHQAHVREVVSRDLGRAIKIGRDKIRPGNRRLRAAPLLSAAVRSLELRQARARVAPELQV

SEQ ID NO: 82771 - protein, 417 aa, Zea mays
  Coding DNA Sequence Number=SeqID_40992
  Homolog annotation: Hit_ID=Q8RV35; Match level="QueryCoverage=28%, HitCoverage=41%, E-value=7e-07, Identity=36%"; Hit description =Putative OsNAC protein
MEAGEHGPRRRTSETVADAVSAGLRAVETAGTCWHSETGPKPVEGLPGATFCSLSYGRKEKEDEGTSGRHRHRFDRMGWHMTEYDDTQGGGGDHVLCKVHRSSSSLAKKKCNSKRTATGDHPEAPPTKVIRDVQVQQMQDPAGAIFTGATAYPTMDDPRMVGGELGKSNVDYLLNINNVDGEQQQQQQPCAEPSSDVQVQVDPAATLMPSYVHGHQQGGDPLMAGGKEEQSRRVESPEAELDYFDDCLNNVDWKGFLEILGDNEEQGLPLQQQPCIEPAEQSSDVQVQVDPAATLMPCYVHGHEQGGDPLMAGGEEEQSRRIESAVAELDYFDDWLNNVYRKGFLEILRDYEEQGLPLQQQPCVEPVEQSSDVQVQVVPAATLMLGDHEEQGLPQQQQPCAEPAAEQSQSSRTVPSV

SEQ ID NO: 82772 - protein, 450 aa, Zea mays
  Coding DNA Sequence Number=SeqID_40993
MGVPDLCARWRAINAPQGGKRETAASRTRAGCGIKAEKHGPRRRTSKTVADAVSAGLRAVETAGTCWHSETGPKPVEGLPGATFCSLSYGRKEKEDEGTSGRHRHRFDRMGWHMTEYDDTQGGGGDHVLCKVHRSSSSLAKKKCNTKRTATGDHPEAPPTKVIRDVQVQQMQDPAGAIFTGATAYPTMDDPRMVGGELGKSNVDYLLNINNVDGEQQQQQQPCAEPSSDVQVQVDPAATLMPSYVHGHQQGGDPLMAGGKEEQSRRVESPEAELDYFDDWLNNVDWKGFLEILGDNEEQGLPLQQQPCIEPAEQSSDVQVQVDPAATLMPCYVHGHEQGGDPLMAGGEEEQSRRIESAVAELDYFDDWLNNVYRKGFLEILRDYEEQGLPLQQQPCVEPAEQSSDVQVQVVPAATLMLGDHEEQGLPQQQQPCAEPTAEQSQSSRTVPSV

SEQ ID NO: 82773 - protein, 143 aa, Zea mays
  Coding DNA Sequence Number=SeqID_40994
MEQEAEEAATKGREEGVVVGERRWSRELAGRGTGVLPGRRRGALAMEELLRGVQNREGGARAHGRRRAGERACLGAGLRKKGLGAMERKGAELPTLAAAAVSSEEEGREAVAAGKSGGVGMQNDQGQGRGIRIYRETLGLGFS

SEQ ID NO: 82774 - protein, 190 aa, Zea mays
  Coding DNA Sequence Number=SeqID_40995
MGRKRSSGAVDLGCVMWLVLARREIPGAVAAGRSWGSVCNSGGRQWGRSFLLKIQGAMEQEAEEATTKGREEGVVVGERRWSRELAGRGTGVLPGRRRGALAMEELLRGVQNREGGARAHGRRRAGERACLGAGLRKKGLGAMERKGAELPALAAAAVSSEEEGREAVAAGKSGGGFEFGLDIEIFGRVE

SEQ ID NO: 82775 - protein, 191 aa, Zea mays
  Coding DNA Sequence Number=SeqID_40996
MGAGSTFPVLDAAQKLLHGQRAPSSPWEHAGAPPCELSAPSPFPNHDTLFSPLGRGFLCFLLHGALNFQQKTSSPLPTPTVADRAPAPASSHGAGDFPAREHKPHDTPEIHSAAAPFPPHLPHQTATAASSTVDLAQQPRRQFTQLHGFPSASRPCRARRNGAASSSHEIPSVALALTRFAQRLRAVVETR

SEQ ID NO: 82776 - protein, 75 aa, Zea mays
  Coding DNA Sequence Number=SeqID_40997
  Subcellular localization annotation: CTP_CleavageSite=64; ConfidenceScore=5.53e-01
MASKFSAQQCRFKKNSSHEIPSVSLALTRFAQRLRAVVETRASRQCQSSRTRVRYKTGRVHHVLAQLKSNPVQGD

SEQ ID NO: 82777 - protein, 263 aa, Zea mays
  Coding DNA Sequence Number=SeqID_40998
  Gene Ontology: Mol. function=pyridoxal phosphate binding; Cellular component=mitochondrion; Biological process=photorespiration
  Homolog annotation: Hit_ID=Q8W2G3; Match level="QueryCoverage=48%, HitCoverage=67%, E-value=5e-66, Identity=96%"; Hit description =Alanine:glyoxylate aminotransferase-like protein
  Pfam annotation: Domain name=Aminotran_3; Domain location=39-260; Score=-33.8; E_value=6.5e-10; Accession=PF00202.11; Description =Aminotransferase class-III
  Pfam annotation: Domain name=DAHP_synth_2; Domain location=1-240; Score=-162.4; E_value=5.3e-09; Accession=PF01474.7; Description =Class-II DAHP synthetase family
  Pfam module annotation: Pfam domain module=Aminotran_3::DAHP_synth_2; Domain location=39-260::1-240
MADVAAHYDDLEVAVGSIEAGFVPFPRYGGCGLGIYMLNIVEGKMQYLFDEDGRRYLDAFGGIATVCCGHCHPDVVEAIVNQAKRIQHSTVLYLNHAIADFAEALASKMPGDLKVVFFTNSGTEANELALMIARLYTGCNDIISLRNGYHGNAAGTMGATAQSNWKFNVVQTEVRAFFDVHDQEGSHPGGIHLEMTGQNVTECIGGSRTVTFDDLSDRYHTHCDPRLNASQSLELAFIIAERLRKRRMRSGLYNSLPLPPLAF

SEQ ID NO: 82778 - protein, 219 aa, Zea mays
  Coding DNA Sequence Number=SeqID_40999
  Gene Ontology: Mol. function=pyridoxal phosphate binding; Cellular component=mitochondrion; Biological process=photorespiration
  Homolog annotation: Hit_ID=Q8W2G3; Match level="QueryCoverage=57%, HitCoverage=67%, E-value=3e-66, Identity=96%"; Hit description =Alanine:glyoxylate aminotransferase-like protein
  Pfam annotation: Domain name=Aminotran_3; Domain location=3-216; Score=-47.6; E_value=3.2e-09; Accession=PF00202.11; Description =Aminotransferase class-III
  Pfam annotation: Domain name=DAHP_synth_2; Domain location=26-196; Score=-178.4; E_value=3.8e-08; Accession=PF01474.7; Description =Class-II DAHP synthetase family
  Pfam module annotation: Pfam domain module=Aminotran_3::DAHP_synth_2; Domain location=3-216::26-196
MQYLFDEDGRRYLDAFGGIATVCCGHCHPDVVEAIVNQAKRIQHSTVLYLNHAIADFAEALASKMPGDLKVVFFTNSGTEANELALMIARLYTGCNDIISLRNGYHGNAAGTMGATAQSNWKFNVVQTEVRAFFDVHDQEGSHPGGIHLEMTGQNVTECIGGSRTVTFDDLSDRYHTHCDPRLNASQSLELAFIIAERLRKRRMRSGLYNSLPLPPLAF

SEQ ID NO: 82779 - protein, 88 aa, Zea mays
  Coding DNA Sequence Number=SeqID_41000
MALLDPPERLQPEVALNLVRNLLGWGAPAFAGRIYVGVSPHNDLTAREFTLFVSNLPSGLALPISSFFVLLLDELSLQPQHFTPCFIL

SEQ ID NO: 82780 - protein, 159 aa, Zea mays
  Coding DNA Sequence Number=SeqID_41001
  Subcellular localization annotation: CTP_CleavageSite=57; ConfidenceScore=5.43e-01
MLLLSAETKKRTTADGSVLHTRRFTLSAHGGRCPRSMTRGPGPPCQRLGHPGARRARSSAVSWGSSAALAAMALLDPPERLQPEVALNLVRNLLGWGAPAFAGRIYVGVSPHNDLTAREFTLFVSNLPSGLALPISSFFVLLLDELSLQPQHFTPCFIL

SEQ ID NO: 82781 - protein, 532 aa, Zea mays
  Coding DNA Sequence Number=SeqID_41002
MDDVYEESHRLLGLDVGEASDLDSLGEFVDGDQQALSWQPTPAGRFPLSRSRLPPPRPTSGPLRARAHAPLTRRPHSSVASPSPSLATAPAGRLAPPVSHPIVLAVYGFAAVTSGHRPLPRPVPSPIPSPHREVRHRPVLAVVAASLHGTAPPCDLVVAAPPIFHSLELNRASAAVFLHSEEVGTVDPEPVAPEEGPEPNLPEGIPGLGEGLRCWLSWFRREQKDCPSYKDQVMKAGEHREDKDGEGFVRFGHGGGLTPSGITVKMEDSLVIRTSYCSEVEGFPHLLRSCALRMGIRKKPEYVWKEYLENGMEKCSMAVYLGESRNYPNHPSFQVTFTGHRFQILARMLPEKPSDNYARTTADNKNTPAWRKRLQALSGRDPTEDDPTIVYMAGYLHTLDNQYDDLASHCTHLNSRVESLEQQVRELTREKVSLQESLEIAEGEETNTREVYRTLKMDYDKKLKKLAPARKICKKTKSQGCQTEQKEEAPPALPPTRIGNSSDTEEMSLASLDDLLKEFGGHFREGVREYPR

SEQ ID NO: 82782 - protein, 288 aa, Zea mays
  Coding DNA Sequence Number=SeqID_41003
LPVVWARVPSMAFYIRALWELMEDSLVIRTSYCSEVEGFPHLLRSCALRMGIRKKPEYVWKEYLENGMEKCSMAVYLGESRNYPNHPSFQVTFTGHRFQILARMLPEKPSDNYARTTADNKNTPAWRKRLQALSGRDPTEDDPTIVYMAGYLHTLDNQYDDLASHCTHLNSRVESLEQQVRELTREKVSLQESLEIAEGEETNTREVYRTLKMDYDKKLKKLAPARKICKKTKSQGCQTEQKEEAPPALPPTRIGNSSDTEEMSLASLDDLLKEFGGHFREGVREYPR

SEQ ID NO: 82783 - protein, 563 aa, Zea mays
  Coding DNA Sequence Number=SeqID_41004
  Pfam annotation: Domain name=MAP7; Domain location=355-514; Score= -79.0; E_value=0.048; Accession=PF05672.2; Description=MAP7 (E-MAP -115) family
MPSSSSSAATTPTTEASSEDLSGTVAAAELRPGDTVEFSVSRMSLVRMQDMQWLGYFGGGVGRVPGAEEVPEPEGELVVFEAFFIVGLRLPAHRFVSEVLQKFEVQDVVDRRGKKPAAVTEDDPAPEAAPSTKKRMLGTAVGELGVSDSFAMELMGTCAAPGGRMSSPELRESSARMLEVTGGRWPKHVPISRAAGEDFFMSRMACDLRVFPYGQNIAAVVSAVMNKDRQDAAQKHRAVIRLPEARPKRARGTAKATVPVGSQLTLAAKPTTPGSSKVPESAKAVGAGGTKSAPDGAAKVRELPSPGKRVADFGTNISVDDYLVGSDEGQLVVVLPAVATTTSTAVLGVKGSAFSAGGEILAVTAVKDEAGTVSRRLWCLPLSWGLWSHHADTVREKSAADSKCRKMAEKVAALEGERTDLWRQLVEERREANQAIAKAQAAQAEAKLARVEGSLASQRAEEWEVRFNALQARMERAEASTHSEVERTRKQLMDSYRELGARTADFEVPDREAGLRFLEWLQEELLALSTIMEGFMSFASLVTCEGAMNALSREGCSHYEGFD

SEQ ID NO: 82784 - protein, 366 aa, Zea mays
  Coding DNA Sequence Number=SeqID_41005
  Gene Ontology: Mol. function=cysteine-type peptidase activity; Biological process=proteolysis
  Homolog annotation: Hit_ID=Q109R5; Match level="QueryCoverage=55%, HitCoverage=20%, E-value=3e-17, Identity=28%"; Hit description=Ulp1 protease family, C-terminal catalytic domain containing protein
MAAILLSSDLNKRRGCLLYKNDKEVDSGSPSDVEILENSIDSKKRKLLHVLHDSEVVYEDEEGPITQADLQKWFVDDWDKRAPVKVSNDGCTNDFLMVGLSTKDMPVTKADSIDVLCDYIMAIEDDMTLEMTWVRSFNPFKIEISVKDLQNILTINQDMILRCFDMAVRLLANKESRRPKGEIINNRKHYMDMRFWRMVGFGKLPKYHQDPTAEELAKTLDCWPSMNYYITGCRYVLMPWKFNGCHALFVIDHVKKHVTFIDFTPTQDWCKHMPYKRFAEAIIMASKKYKIAYSKKRSGWAEDIFKWEHTIQTGVPIDLRGFNTSYLVLQAMSMWGNDRRMKFVGDAKIVRRNFVIDLLSYEDNSC

SEQ ID NO: 82785 - protein, 375 aa, Zea mays
  Coding DNA Sequence Number=SeqID_41006
  Gene Ontology: Mol. function=cysteine-type peptidase activity; Biological process=proteolysis
  Homolog annotation: Hit_ID=Q109R5; Match level="QueryCoverage=54%, HitCoverage=20%, E-value=8e-16, Identity=27%"; Hit description=Ulp1 protease family, C-terminal catalytic domain containing protein
MAAILLSSDLNKRRGCLLYKNDKEVDSGSPSDVEILENSIDSKKRKLLHVLHDSEVVYEDEEGPITQADLQKWFVDDWDKRAPVKVSNDGCTNDFLMVGLSTKDMPVTKADSIDVLCDYIMAIEDDTTLEMTWVRSFNPFKIEISVKDLQNILTINQDMILRCFDMVVRLLANKESRRPKGEIINNRKQYMDMRFWRMVGFGKLPKYHQDPTAEELAKTLDCWPSMNYYITGCRYVLMPWKFNGCHALFVIDHVKKHVTFIDFTPTQDWCKHMPYKMFAEAIIMASKKYKIAYSKKRSGWAEDIFKWEHTIQTGVPIDLRGYVHVGNDRRMKFVGDAKIVRRNFVIDLLSYEDNSCRYVIPANIQQRLIDIAKKD

SEQ ID NO: 82786 - protein, 296 aa, Zea mays
  Coding DNA Sequence Number=SeqID_41007
  Homolog annotation: Hit_ID=Q2IMJ3; Match level="QueryCoverage=62%, HitCoverage=27%, E-value=2e-07, Identity=33%"; Hit description=LigA
MANDTNAHGGNSRAQGLLDARTKRCAGANRRDDGWAGVLDRRNDGTEKNGASGSAQPSSSHGELAVRQEKGGGERKEAAHLDGAHDDGCSGARQHRAGRSEVGERRLTTAARRRDSLRSEYGERARGDDGGTPTAQGTQRARARQGGAVLGEKLRRNRGQFDFGDVVGERNAQNRFGKKNNARKLSDARARLGSSGGGAPCAGERLRARYARLGVRPGLPGALGWGLARAASWAGASWAGCLRARGGGEEGLARWAAAGGSWNGPRRGGPSGGGGEREGEKGAAGPAELGQGRELG

SEQ ID NO: 82787 - protein, 94 aa, Zea mays
  Coding DNA Sequence Number=SeqID_41008
  Subcellular localization annotation: CTP_CleavageSite=36; ConfidenceScore=5.11e-01
MARARLSRPGRPVLLRPVVPSVEYPSPAVVSPVGPCAALVRALAFACAQCVDGTPSTFAYSSSTPRRLSSTPVYPPPSNPVRVRVVRHRPRVAQ

SEQ ID NO: 82788 - protein, 311 aa, Zea mays
  Coding DNA Sequence Number=SeqID_41009
MVIHKDDHHPCGGEKQAGLRPLPRPQLQGCSSSWMRRRVHRVEGRLRVGSGPLLPSVIGGEGRSPPVALSAAASLAPRSERPWRSFRCLLLPLGRSVAARSPHGLAMSDPPCVVGCTGGSPNTSYATRAVLVFWDSPGEDGSEDLPVQFGVAAVCRCGVGGQVAAVVGAKVVVVAIGEASSADETISATWIRTPAFWLEWLVLVPRTGDGFEGLFLDGFEGLFLDGFEGLFLDGFEGLFLVVFASRQSLLLSSHPRRRSLSLLVQWSPTNCLELVIPQAFWCGGCLFLREWTQSPVCSGTILRARCNRFEY

SEQ ID NO: 82789 - protein, 372 aa, Zea mays
  Coding DNA Sequence Number=SeqID_41010
  Subcellular localization annotation: CTP_CleavageSite=32; ConfidenceScore=5.47e-01
MPSHSSLVSLPSTFRAPKWGAPVWLSSCCCLRSATSWGLALSSHRSASRIFIMQPGCSPLPMVIHKDDHHPCGGEKQAGLRPLPRPQLQGCSSSWMRRRVHRVEGRLRVGSGPLLPSVIGGEGRSPPVALSAAASLAPRSERPWRSFRCLLLPLGRSVAARSPHGLAMSDPPCVVGCTGGSPNTSYATRAVLVFWDSPGEDGSEDLPVQFGVAAVCRCGVGGQVAAVVGAKVVVVAIGEASSADETISATWIRTPAFWLEWLVLVPRTGDGFEGLFLDGFEGLFLDGFEGLFLDGFEGLFLVVFASRQSLLLSSHPRRRSLSLLVQWSPTNCLELVIPQAFWCGGCLFLREWTQSPVCSGTILRARCNRFEY

SEQ ID NO: 82790 - protein, 88 aa, Zea mays
  Coding DNA Sequence Number=SeqID_41011
MPHNICQEGLRSDTSCDGTSQKQQKSATSSPKNNEGINPEYGILSKSYPTKEKTLKGMLVKGVKQSSEKDFKIARKVANAPGLAFVYR

SEQ ID NO: 82791 - protein, 93 aa, Zea mays
  Coding DNA Sequence Number=SeqID_41012
MAPLGPVYALAGAPPRAAVVGDLTCGEIEPQGPRCKLSVTDTNKREEEIEVTEDRTPPPSDLQAGNCFYFDICGSEPESPVNEGKPRCICHLP

SEQ ID NO: 82792 - protein, 129 aa, Zea mays
  Coding DNA Sequence Number=SeqID_41013
MTSHGSSDEGNAQSHTDGLAREGFPCILWEVLQGAGYTTPPQYAVQLFEKHRVPRCRPGWRSLDSESFGYRAEDTIEAIALHGLTTFCGFHPLELSTHPIGLFPAEKEDEPMWKDRVEHAKDIWAIYPG

SEQ ID NO: 82793 - protein, 305 aa, Zea mays
  Coding DNA Sequence Number=SeqID_41014
MTCHSCEIKAVVTTNLRLTSPTPSIQVFAEKHCSGTGEVSQTNSGEPIGVAELGLPLLHGVRGQRSERAGTVERELVTRRLPSTRCSCSRSTECLAVGAEDTIEAIALHGLTTFCGFHPLELSTHPIGLFPVEKEDDPMWKDRVEHAKDIWAIYPGQTAHLTVRCMNALYRLQVMRGEAMSHLMALLEATKITLDNREELVVDLSTEMVEKDLQVEQLSNEIQELEELVGTRENTIEVLEDQLINTQQQLAEANQHLDMHHQEIQDMEANEDVNIKGGEEPASSLDTASSGRPPSPESSVALFAH

SEQ ID NO: 82794 - protein, 108 aa, Zea mays
  Coding DNA Sequence Number=SeqID_41015
MVRPEHSPPMSSPACARGPADSGHHRRRVVPRCDRQNLPEPTPPLVGPPSPPEVAPDPAPEPAPEDLPASALEGSLEDMVAGVTWLSILPPGWTVEWDPTSAEEEHEE

SEQ ID NO: 82795 - protein, 127 aa, Zea mays
  Coding DNA Sequence Number=SeqID_41016
  Subcellular localization annotation: CTP_CleavageSite=17; ConfidenceScore=5.02e-01
MVRPEHSPPMSSPACARGPADSGHHRRRVVPRCDRQNLPEPNPAPRRTSLTTDCNLADGEYILVPEQGVAQEVAPDPAPEPAPEDLPASALEGSLEDMVAGVTWLSILPPGWTVEWDPTSAEEEHEE

SEQ ID NO: 82796 - protein, 319 aa, Zea mays
  Coding DNA Sequence Number=SeqID_41017
  Homolog annotation: Hit_ID=UPI0000D9DFFD; Match level="QueryCoverage =35%, HitCoverage=23%, E-value=9e-14, Identity=39%"; Hit description =PREDICTED: similar to Protein C9orf126 homolog, partial
MVARRTRRAEAAARVIEMYSKSVTTPPTGSCMADLFAGLIAEDMRKLATGKVREFSLSAKWCPSLDSSYDHSTLIWLRARARRAASSPRAPRRLFPKGSAFKAYTRLWRLQQERRRDLVAVGLRRWEIGEVASRIGQLYYARYLRATEPRSLVGAYVFYEAIYSRDYFGVAAATVGTNSGGGGVSRHQALLIRCKELQFIARFLVVSMLMWPTVACLALSQDWLLDQFGVLHDGKKSYPTILACMLVVSLEPPLCVQDLGMLDILEWAPEISYIWTTMIDAVISKLESKTGENLMVTEIVGPKQIAEVVCNTQFVKDHI

SEQ ID NO: 82797 - protein, 279 aa, Zea mays
  Coding DNA Sequence Number=SeqID_41018
  Homolog annotation: Hit_ID=Q948S9; Match level="QueryCoverage=25%, HitCoverage=16%, E-value=3e-23, Identity=78%"; Hit description=DNAJ homologue
  Pfam annotation: Domain name=DnaJ_CXXCXGXG; Domain location=208-263; Score=-40.5; E_value=0.099; Accession=PF00684.9; Description=DnaJ central domain (4 repeats)
MAGAAAGASEEAVERAHGLCQGSMREHADLLSSVRDDSPGPTVACRHECICSGNELPFMAASTSRTIQQIQIRVMDMFSVKSLYNYLWNCIDYLYSDWLQDLFGVLHDGKKSYPTILACMLVVSLEDWLLDLFGVLHDGKKSYPTILACMLVVSLEDYSNPFDLFESLFEGFGEMGGMGGGRAARNRPMQGDDESYNLVLNFKEAVFGVEKEIEITRLEGCNTCDGSALGKIYDGGIRFRLDISFTNAAPCIHGICAEDARKILNNHGTCPILSMVAEP

SEQ ID NO: 82798 - protein, 190 aa, Zea mays
  Coding DNA Sequence Number=SeqID_41019
MRKKHGSAPKLHKCSGLDSRNEQKTLAFEMPLPTELRFPPPQVRTTPLRGGRPAEQRKADERRAVTCSGSGDNDDFCSGGPNSGSTDLRVDAAARRPPPMPKLVRQGRAEGREVGGTGKGGYPERDPSPRRNRAPSPPLLIRGSKAGPPKGSTVASDRVGPTPTTGQGFEGQPLEGFHGRLRLLGLRAHY

SEQ ID NO: 82799 - protein, 371 aa, Zea mays
  Coding DNA Sequence Number=SeqID_41020
MRKKHGSVPKLHTCSGPDSRNEQKTLAFEMPLPTELRFPPPQVRTTPLRGGRPAEQRKADERRAVTCSGSGDNDDFCSGGPNSGSTDLRVDAAARRPPPMPRLVRQGRAEGREVGGQPVADPGRRAGGRTSSSCRGGRRRRERPRSHSRLKTGHAAAAGPHGQYPLLPPSLSERSGPSPTQGPTPTRHSPLPALVMKILEAEGGGRRPQLGSLSPTIKPEVAISGNSPYVRPQAPRAESSPTRSKALPCDSGAGSRMSYKPAQGRRSQTAARGAHDRPAVTSDPPFSPRPTGRRGGQPCRRHATAPDGRASPTSDMPSLGNPGPTRRANRRAQLLHASKPHRPLVPTFAPSFSLREPNARDSRVNPPASGL

SEQ ID NO: 82800 - protein, 166 aa, Zea mays
  Coding DNA Sequence Number=SeqID_41021
MVRERRTQTTTMSKNTRDTRFIPRFGHTTKVPYFLVEAPPKSRVSFNPNPPFADHKGQAHTLIFAQTSGVWEVYIKVPTKAGGRWGKLAKNRLNRFVNRLNRFPPGRTRFTDLLSRRVNRTQNRLSRAQIRLNRFSQNLHTTFSDRTDWQTGSDRAEQCRNRLNRF

SEQ ID NO: 82801 - protein, 376 aa, Zea mays
  Coding DNA Sequence Number=SeqID_41022
  Homolog annotation: Hit_ID=Q6QP51; Match level="QueryCoverage=50%, HitCoverage=79%, E-value=3e-26, Identity=44%"; Hit description =Putative growth-regulating factor 1
MPRLLGATEPVQRLEAAPRMTQQCQLSTTVTGQSAAGIGTTVDMTIGRPAVIAATDVRKQRDRERGYFERILLSEGNGPRALLLIRGSKVAPCGVRRPPQSNRAPSPLLIRGSKASPSKGFDSRPRACRVRDDPGYVRYMAKARAMLPRYPKTFLRPAGTVCNGIPPKGGTEPSDPIERVRVQQTTCSLGRNRELCLARPQASALAPASGEGLRLARPQASASASASGEGLCLSRPQASASALASGEGPRLARPQPRPQEKSSPRPTSASDRLRYRGYIITLPLASRLRLRRNKTDVTSRLLRQQPQETYTYLKQIVPYRLRCRQGEERHPGVIPTRGGIWPGLGRRHRRKDLHLEKGSQHRAWALGSRVKPSDLG

SEQ ID NO: 82802 - protein, 92 aa, Zea mays
  Coding DNA Sequence Number=SeqID_41023
MASLGHPERFQSEGALNLVRGLLGWSVPGLAGRIRVGAAPLGGLAAGEFMLFVSYISCGLALQISPFFLLLLDVGGRNPPAGWRNARAQILR

SEQ ID NO: 82803 - protein, 92 aa, Zea mays
  Coding DNA Sequence Number=SeqID_41024
MASLGHPERFQSEGALNLVRGLLGWSAPGLAGRIRAGAAPLGGLAAGEFMLFVSYISCGLALPISPFFLLLLDVSGRNPPAGWRNARAQILR

SEQ ID NO: 82804 - protein, 222 aa, Zea mays
  Coding DNA Sequence Number=SeqID_41025
  Gene Ontology: Mol. function=DNA binding; Cellular component=nucleus; Biological process=regulation of transcription
  Homolog annotation: Hit_ID=Q5N9B7; Match level="QueryCoverage=36%, HitCoverage=28%, E-value=5e-14, Identity=54%"; Hit description =Putative MYB transcription factor
MAKEIKSTEDEGYDDYSYEVFFRQRLFDFIVMWNATSIRNVETRALDPLAAIEETSSFLELIAIRYHQACRGEQGPPLCLLLRQAAATEGVGEEGQGRGGGTTPTQVASHAQKYFIRLNSGGKDKRRSSIHDITTVNLTDDQPPSPSQSSLITSESNAPALAPAVGICQVPLPPDAKRHGAKTLPFSSPNRTSVAPAYRMEFHDQQCLRFGPLHDQLLTSRE

SEQ ID NO: 82805 - protein, 120 aa, Zea mays
  Coding DNA Sequence Number=SeqID_41026
  Homolog annotation: Hit_ID=Q336U3; Match level="QueryCoverage=37%, HitCoverage=8%, E-value=1e-08, Identity=71%"; Hit description =Proline dehydrogenase family protein, expressed
MTPEAGLGCCQPHSVGWLSSWSGAGGAVLLSDRSVERRSDCGHFGSVDWRACVRIKVSDHLCIKCPCDLVEIVVFMLQYLLKATRHAEENKGLLSASSFDRQLLRKELVRRVKAAVAGRE

SEQ ID NO: 82806 - protein, 375 aa, Zea mays
  Coding DNA Sequence Number=SeqID_41027
  Gene Ontology: Mol. function=nucleic acid binding
  Homolog annotation: Hit_ID=Q2QU58; Match level="QueryCoverage=87%, HitCoverage=71%, E-value=7e-20, Identity=25%"; Hit description=Zinc knuckle family protein
MARRRSQKNKKTPPKENNEVTLEILLSDCSNYDSWATRVLNAFRTVDPQLEQILYKSIIPPSYDKNNTSEEDQRCIRLNYLAYDILSNSLSNEDYRAFISNYNESIHDAHDIWTRIKIKFDESKHDSSFCASTSFGICETNPLKEEENERWRPNDESTSPKGLSSHFDSHICCVANENDSGSTNEDEEDERSFMRLYAQLSLEDKAVMLKLLERAREQSNARQMLEDILSLKMLSFDELTKEHEELKCSHVDLVQSKSSFELEFAGTKEDTYQKLKEENERLKMSLTQLKGKCIAQPSQDNHDHMVKKLETGTTVACTKSLEENVKDLRIAKRKEQKKKINTSSKSLNHASIKGIKELILCQKVEVYNMEESQRM

SEQ ID NO: 82807 - protein, 419 aa, Zea mays
  Coding DNA Sequence Number=SeqID_41028
  Gene Ontology: Mol. function=nucleic acid binding
  Homolog annotation: Hit_ID=Q2QU58; Match level="QueryCoverage=78%, HitCoverage=71%, E-value=8e-20, Identity=25%"; Hit description=Zinc knuckle family protein
MARRRSQKNKKTPPKENNEVTLEILLSDCSNYDSWATRVLNAFRTVDPQLEQILYKSIIPPSYDKNNTSEEDQRCIRLNYLAYDILSNSLSNEDYRAFISNYNESIHDAHDIWTRIKIKFDESKHDSSFCASTSFGICETNPLKEEENERWRPNDESTSPKGLSSHFDSHICCVANENDSGSTNEDEEDERSFMRLYAQLSLEDKAVMLKLLERAREQSNARQMLEDILSLKMLSFDELTKEHEELKCSHVDLVQSKSSFELEFAGTKEDTYQKLKEENERLKMSLTQLKGKCIAQPSQDNHDHMVKKLETGTTVACTKSLEENVKDLRIAKRKEQKKKINTSSKSLNHASIKGIKELILCQKVEVYNMEESQRMLTYDNLQESKCKPQASRVTLHPKKERLMKSKGTGVMQKANAKSA

SEQ ID NO: 82808 - protein, 239 aa, Zea mays
  Coding DNA Sequence Number=SeqID_41029
  Gene Ontology: Mol. function=triacylglycerol lipase activity; Biological process=lipid metabolic process
  Homolog annotation: Hit_ID=Q2R051; Match level="QueryCoverage=50%, HitCoverage=27%, E-value=3e-40, Identity=51%"; Hit description =Lipase family protein
  Pfam annotation: Domain name=Lipase_3; Domain location=64-154; Score=- 28.4; E_value=0.089; Accession=PF01764.16; Description=Lipase (class 3)
MALSLGLDGPEVRQELILLLRYLKQCMYFSKKPYSVFLDYGGYGQNDVLIKKSKARILKPAFTIVCDRSSQCFLLFIRGAISVKERLTAATGAEIIGHSMGAGIATILTYILRENEKLASSTCIAFGPDEYDGQVRELNCKSICHSPMCPPYAHSSSRKNSKKEINELEDCAALTGQLQPFVKEEVLVPIFNGTFPCTAEQFFSILLSDDSNYITECRTDRKDKDINVGIQLIASLLHI

SEQ ID NO: 82809 - protein, 147 aa, Zea mays
  Coding DNA Sequence Number=SeqID_41030
  Gene Ontology: Mol. function=triacylglycerol lipase activity; Biological process=lipid metabolic process
  Homolog annotation: Hit_ID=Q2R051; Match level="QueryCoverage=95%, HitCoverage=22%, E-value=6e-58, Identity=71%"; Hit description =Lipase family protein
MALSLGLDGPEVRQELILLLRYLKQCMYFSKKPYSVFLDYGGYGQNDVLIKKSKARILKPAFTIVCDRSSQCFLLFIRGAISVKERLTAATGAEVPFHHVVVQEGRVSNLVLGYAHCGMVVAARWIAKQAIPCLSKAIEQFPEYEVK

SEQ ID NO: 82810 - protein, 184 aa, Zea mays
  Coding DNA Sequence Number=SeqID_41031
  Gene Ontology: Mol. function=triacylglycerol lipase activity; Biological process=lipid metabolic process
  Homolog annotation: Hit_ID=Q2R051; Match level="QueryCoverage=62%, HitCoverage=17%, E-value=1e-43, Identity=69%"; Hit description =Lipase family protein
  Pfam annotation: Domain name=Lipase3_N; Domain location=70-149; Score= 19.5; E_value=0.0024; Accession=PF03893.7; Description=Lipase 3 N -terminal region
MGAKGMATAAGTAVLLYLVLSGRLCGDAAGDGGNLDDQLISSAVSAAAEARRRRKEDARARREQRRASRTKWRWPERAPDGWGEAAALAARTVRFTWAETLGKWALGEVSFGIKHYMRQQGNLQHEYAGSDSVLLDGPEVRQELISLLRYLKQCMYFSKKPYNVFLEYGGYGQNDVLIKKSKAR

SEQ ID NO: 82811 - protein, 369 aa, Zea mays
  Coding DNA Sequence Number=SeqID_41032
  Homolog annotation: Hit_ID=Q108Z7; Match level="QueryCoverage=42%, HitCoverage=9%, E-value=1e-19, Identity=34%"; Hit description =Transcriptional regulator, putative, expressed
  Subcellular localization annotation: CTP_CleavageSite=58; ConfidenceScore=5.58e-01
MEMRAAPDRATPRMVAAMSPPTPERGTLGRRVAAVAVSAGSPRSSPDRGRPALVERSSATALVCTPLRKKASDRRRGWDSWRSPWLRPRRRRYTGRVQAGRRRKERRPPTPKRYADDREMAGVKVVPQLLALAPKLLREIAQSFSQQRKQREGGGPTYHETFAYAQGPFARVPEALSSKPGHLSASQQRVYEDFVHVWHPHNQNVGATGSGLSGVATVSSTLGVLRAYSPNSTSASSIGAASTFSPLASNDLPVSEISAMVPPPSTSADRLGSILPEPLNTGDALERYKQVAQKDKVDARQAKEKASAAALERQQAYDAALACLAKVEDEDHVHLDAPVPSPDWDQMDCVVKSWILDSLVDDLAENVSS

SEQ ID NO: 82812 - protein, 213 aa, Zea mays
  Coding DNA Sequence Number=SeqID_41033
MVPPPSTSANRLGSILPEPLNTGDALERYKQVAQKVLIFWLVLRDVNGDPIPANPWGFPLLGYWYGTKIVPMGTDMGQNLHPLGKWVWEAIIRTRLPMGISYVYTCHVCMNELRSSRPPSPARQRTRPQGNVDCPVTRLVGTSRWKFFTSKIMKSICDLDKTPGPGRQLLLYSVNCLVMRFLLYLVNCVVLRTHCRSFCIKCSSDEELLLSLS

SEQ ID NO: 82813 - protein, 148 aa, Zea mays
  Coding DNA Sequence Number=SeqID_41034
MSCGPAIVSANTKTPKGEKPTTKTGVYCSQGAHTSAVIKFLSVLTKPQWCKGWMELAEWQYRKYCTSDAKKALVEITGKKTLDKFTDQPGNLIPIDEAEVPDLSASRDNSDLAEDDPCDPTTTSKPEAPMQSLNQLPVVTDLADARSA

SEQ ID NO: 82814 - protein, 115 aa, Zea mays
  Coding DNA Sequence Number=SeqID_41035
MAELRLCKNHSGERGPAEPRREGAHRRVSRVADGKVKLTVALNGARAQRRPQNRRWTSASGVGGSRFTWAERERGRETWAEGANGSGEVGEQGAGFKRGTGARSWPENARSWARP

SEQ ID NO: 82815 - protein, 119 aa, Zea mays
  Coding DNA Sequence Number=SeqID_41036
MGAVVPLGPAAGTRRRRADRPRWGTRGLGGNRGAREVAHLEGTRWRHGATTEAQGRNGATVAELRLRKNHSGERESAEPGREGAHRRAILQRALATSEQLFRDTDRYITANKRAHDLID

SEQ ID NO: 82816 - protein, 389 aa, Zea mays
  Coding DNA Sequence Number=SeqID_41037
  Subcellular localization annotation: CTP_CleavageSite=40; ConfidenceScore=5.14e-01
MLDASKSKGCAPLVRLHAACMAAFALPSCIAPFHLPSPRMGSARVAFVLLLLEERNFAEVGTFQPSLGFKDFHQAARLHPLADGERVLTCLAEGADFDNTGPIGRKRRQLYAASGATSHRWAERGYLPVVRAVVAPCAPGGRPRRRALLGRRSCSWAVLPLLRYDASARRSVLARPGGPEWGSAGGQTAAIVGAEVVVAEEVLVTDEIAAAIRAPGFGSLALIACSRPSSGDVGEGLIVATSALRSSLLLFGRPERRSLPLLPEWATARHLGFCRPAGPPTWGVESLGSVGLSAQGFSCPVKETLSRSAMSRSRRQRCQHGQRQSWLEKKLRRPEPGRAVHWRDQRRSRVVEAMSRANVLGGQLAEATERPVEPSARAGFLEETPATMA

SEQ ID NO: 82817 - protein, 204 aa, Zea mays
  Coding DNA Sequence Number=SeqID_41038
  Homolog annotation: Hit_ID=Q6QP51; Match level="QueryCoverage=40%, HitCoverage=26%, E-value=8e-13, Identity=50%"; Hit description =Putative growth-regulating factor 1
MQAACNRTQRAHPFDFVQETAPPLALVPRLLDCGTSAATRGDPAHDPTVPTEHIGHGTGGTFGRRSRRRFTSAIMTASKKVCHVIRFRILFHFLFLSLASGIGKRDTPKGILLREGSGPRAPLLIRGSKTGPSEGFNSRLKALGLRAHYWSEVRRLDPRKGSTAASGHSGSAPTTDQGFVGWHPKGSTAASDAERGMTLGMFDT

SEQ ID NO: 82818 - protein, 119 aa, Zea mays
  Coding DNA Sequence Number=SeqID_41039
KGTTTGISNLATSQGIATRGIVDDTDECTFRAFQLYVLNHIKFFMLCTIVCKIIDFGHIDKFSVHELLAYTEEYIDEQFSGNLGEILIRTRIFDRYYLIKVNLRSIVVDVATLAIDTIQ

SEQ ID NO: 82819 - protein, 121 aa, Zea mays
  Coding DNA Sequence Number=SeqID_41040
MPLRLFTGVGWVHLETWSAIEFQMKENSNQLTLHIRKLEIDGGEAKAAASRGRLSSSRQIIDFGHIDKFSVHELLAYTEEYIDEQFSRNLGEILISLKLETYYENIQSLLSTYEDIIVKRL

SEQ ID NO: 82820 - protein, 121 aa, Zea mays
  Coding DNA Sequence Number=SeqID_41041
MPLRLFTGVGWVYLDTWSAIEFQMKENSKQLTLHIRKLEIDGGEAKAAASRGRLSSSKQIIDFGHIDKFSVHELLAYTEEYIDEQFSGNLGEILISLKLETYYENIQSLLSIYEDIIVKRL

SEQ ID NO: 82821 - protein, 176 aa, Zea mays
  Coding DNA Sequence Number=SeqID_41042
MEARPRRQHQEDASLAQGRFCFDLSVDNLVDDTDECTFRAFQLYVLNHIKFFMLCTIVCKIIDFGHIDKFSVHELLAYTEEYIDEQFSGNLGEILISLKLETYYENIQSLLSIYEDIIVKLKGGTYKDAEPQHVGPGAKQMEYVIEVSNASIAQKISERHNVCSPYSIDISRLFPR

SEQ ID NO: 82822 - protein, 77 aa, Zea mays
  Coding DNA Sequence Number=SeqID_41043
MGTVDVCGDEVPRHVVCLGLPCKDKNSIRIVCFSQLMRLLDPLYLLDLVDGVTWPSSLPPGQTVEWVTASAGEDQEE

SEQ ID NO: 82823 - protein, 60 aa, Zea mays
  Coding DNA Sequence Number=SeqID_41044
MDPHQCGRSKRTWGLWGFALKRIDTMYLLDLVDGVTWPSSLPPGQTVEWVTASAGEDQEE

SEQ ID NO: 82824 - protein, 185 aa, Zea mays
  Coding DNA Sequence Number=SeqID_41045
MTSHESSEGGNTYSHTDGLAREGFPRILWEVLQGAGYATPPQAEDTIESTALHVLTTFCGFHPLELSTHPIGLFPAEKEDDPMWQDRVEHAKDVWALYPGQTAHLTVWCMNALYRLWTVRGEAMSQLMGLVVSTKITLDNREVLVVDLSTELVEKDLHVEQMATQIQELEDQVEARENTIEVLED

SEQ ID NO: 82825 - protein, 70 aa, Zea mays
  Coding DNA Sequence Number=SeqID_41046
MATQIQELEDQVEARENTIEVLEDQLQTTQQQLEEANQHLDLHHQEIQDMEAEGADEDVDIDGGGAGACI

SEQ ID NO: 82826 - protein, 63 aa, Zea mays
  Coding DNA Sequence Number=SeqID_41047
MAGPRRVAGSAAVRPPARPTGRGRGREVASTGELATAHNGDNGMARADGATGWLGQTQGAKPS

SEQ ID NO: 82827 - protein, 116 aa, Zea mays
  Coding DNA Sequence Number=SeqID_41048
MAEAGVRNWGARGGPFIGARGREGGEWWRALASSPRRRWWSTMVTTGWLGQMGRREGSGRRKAPNRAGERDNGEATGREVAGGNRVASPGHGREEGADGRGPLARERSRESEGRAG

SEQ ID NO: 82828 - protein, 98 aa, Zea mays
  Coding DNA Sequence Number=SeqID_41049
MDKICRFGPLRSPRKNDLTNYWALGPFVRPFTSLVDPGDIYPPQDAKLKELSLLLTAEPFAFSQSNIATHAPQSSPMPRQADVAYLLERRSLREHAAE

SEQ ID NO: 82829 - protein, 143 aa, Zea mays
  Coding DNA Sequence Number=SeqID_41050
  Homolog annotation: Hit_ID=Q10PY3; Match level="QueryCoverage=31%, HitCoverage=13%, E-value=2e-12, Identity=73%"; Hit description =Expressed protein
MRDPRPTAMRADYASTGSGLPIVILSSNRDPGHIEFRPNRSPIDSARAEAWDVTFKQIMAGECKLVGSASCCDYREILWKIMEQVKAESDQWIEMQDMLEQESGKEEIKKHILICCVKRSLSSVLSKRSPFQEIGNISLPRHR

SEQ ID NO: 82830 - protein, 174 aa, Zea mays
  Coding DNA Sequence Number=SeqID_41051
  Subcellular localization annotation: CTP_CleavageSite=42; ConfidenceScore=5.44e-01
GVRSRARQIQLPLTFSLPSTAGAGAGGSTPTGGGLKNTAAASASTRQATAEACSSHVHHAHLAALLNASTRLPPLPLSRLHLPLSLPTASRLVASFPPLPLLVCFLRALHLLPSSPSRPFDSLIKSYAEAVRSASAEAVRSGSHGLDALGGSGSGRGGCLDRGVGFGGDGGVSG

SEQ ID NO: 82831 - protein, 365 aa, Zea mays
  Coding DNA Sequence Number=SeqID_41052
  Homolog annotation: Hit_ID=Q5G1U0; Match level="QueryCoverage=19%, HitCoverage=10%, E-value=4e-21, Identity=76%"; Hit description=NADP -dependent malic enzyme
  Pfam annotation: Domain name=malic; Domain location=215-326; Score= -16.9; E_value=1.1e-06; Accession=PF00390.9; Description=Malic enzyme, N-terminal domain
MDHSIQPFRQRLCARKIGFQWRQLYLHSRRHRLRTPLPDPDNHPAQIRIHLVHQDRGYRISQPPRMLRAAIPTEVRPAPRRGLHPLPREFLEKLIRLPDLTASAYDLMSESKGRDGEEGRRWSARRKQTRSGSGGKDATRREAVGSESGRWRRLRGSGGKRVEALRRAARCAWWTWLLHASAVACRVEAEAAAVFFRPPPVGVLPPAPAPAVEGKEKVNGSWIWRARDRTPSAARRCPDPFRFATLRRYSQVTSNLMSYYGMCGLAKECLHQRYFSKEYSEFLDEFMAAVRQNYGQKVLVQFEDFANHNAFTLLEKYMTNHLVFNDDIHLYDQVTSDVICHGEKTSYKMGARAFLVAILAYTDLF

SEQ ID NO: 82832 - protein, 194 aa, Zea mays
  Coding DNA Sequence Number=SeqID_41053
  Homolog annotation: Hit_ID=Q5G1U0; Match level="QueryCoverage=36%, HitCoverage=10%, E-value=1e-21, Identity=76%"; Hit description=NADP -dependent malic enzyme
  Pfam annotation: Domain name=malic; Domain location=44-155; Score= -20.1; E_value=1.8e-06; Accession=PF00390.9; Description=Malic enzyme, N-terminal domain
MAILPAGSDIHGYPTRRFRVRVRNLTRGSHPYPTHDKIGSVEGKEKVNGSWIWRARDRTPPAARRCPDPFRFATPRRYSQVTTNLMSYYGMCGLAKECLHQRYFSKEYSEFLDEFMAAVRQNYGQKVLVQFEDFANHNAFTLLEKYMTNHLVFNDDIHLYDQVTSDVICHGEKTSYKMGARAFLVAIRAYTDLF

SEQ ID NO: 82833 - protein, 248 aa, Zea mays
  Coding DNA Sequence Number=SeqID_41054
  Homolog annotation: Hit_ID=Q5G1U0; Match level="QueryCoverage=26%, HitCoverage=9%, E-value=4e-26, Identity=93%"; Hit description=NADP -dependent malic enzyme
  Pfam annotation: Domain name=Malic_M; Domain location=1-167; Score= -111.4; E_value=8.7e-05; Accession=PF03949.5; Description=Malic enzyme, NAD binding domain
MATLLVQSFTAEGLIVASREETLQSFKKRYAHEHEPVKDLLGAVKAIRPTALIGSAGVGQSFTKEVIEAMSSINELYDQVTGDVICHGEKTSYKMGARAILVAIRVPALRRGALRVRWVTAALFSSGILAGNKPILVRDFVRSALYDPNHGYFSKRAGPVGVLDASIRFNQLEGAMVCLHNSSIDSAYSKSFSPIEVEISSSLAEKQLETVGEVQSHLSKFTVEHRDAINRPGWGRTDPHPCWVLMLE

SEQ ID NO: 82834 - protein, 98 aa, Zea mays
  Coding DNA Sequence Number=SeqID_41055
MASGAWAVCASALLPGFWYADGLYGNGGICYGSYNLAQGFWYGHHPTAFPEGGGDNEDNIGFYGVYDYGCLWCNLCSSKEEVVEADLQEFQDFDEFED

SEQ ID NO: 82835 - protein, 261 aa, Zea mays
  Coding DNA Sequence Number=SeqID_41056
  Homolog annotation: Hit_ID=Q5VMY9; Match level="QueryCoverage=50%, HitCoverage=11%, E-value=4e-07, Identity=37%"; Hit description =Hydroxyproline-rich glycoprotein-like
MARARFATWASIGLRVQRRRGLRRVPAGGGWHRVPGQCAHRRCFLGAHDAVLHGAGAAAGRGCRSVSWLGFGASVGVASGRRGGSTVGPPGGARGTGHRCVGSVQSWARLGPCAGYRAPGARAGSGAVGQGQGRSARLLADRGRGEGSEGGRSTGSRGWRSAWRKKTEAAAAMQRNRGGFWYADGLYGNGGICYGSYNLAQGFWYGHHPTAFPEGGGDNEDNIGFYGVYDYGCLWCNLCSSKEEVVEADLQEFQDFDEFED

SEQ ID NO: 82836 - protein, 1134 aa, Zea mays
  Coding DNA Sequence Number=SeqID_41057
  Gene Ontology: Mol. function=helicase activity; Biological process =viral genome replication
  Homolog annotation: Hit_ID=Q10GM7; Match level="QueryCoverage=75%, HitCoverage=62%, E-value=0.0, Identity=47%"; Hit description =Expressed protein
  Pfam annotation: Domain name=DUF889; Domain location=996-1134; Score =149.7; E_value=7.7e-42; Accession=PF05970.5; Description=Eukaryotic protein of unknown function (DUF889)
MSAEKKNELKKRRESRKKGNVMHHEYSEVCNIPANKDNNNHQNNEIEDVDDDSYQLHKNNSFEDLIGIEDPKFTPELVWSSTDAEAPHGSLCSSEGMAIPKLSPTPFVPNPSQTEDVEKDSMTESPRRQRHKRHVSSGQRQTLVSRQNQKFHLAIGTNFATATRDRVMENDVDNEIDHQTVSEIDNNEDDDEAVLFEDDEDEGYLFAGQDGESGEDIDIDETQDAFTVIPDIPDPYDKGSWGGEQKHLELYFYDDDPSLEHRYRKCRQEQLDKDKAVIKHLVEILKGNPYSEHLRSMGHVDNIEDYHIALNLDQTLNQKLYNATITSEVAAVWIEGSERRGQFNNSVMLHGKDRSSHGIRSYHGCYDALSYPLFFPKGELGWHANIPKSNVSMDEVEAYRDQHRTRDANDDDTGIFNPILHGKRLFQQFAVDSYIKVESSRLDFIRRNQDRLRADLYKDLVVRIFRAKLEELKKRLTKQHILGKIHAYVYVVEFQKRGLPHAHFLLIMQRKYKLTCPDQYDLLISAEIPDKKKYPQLYKMVIKHMMHGPRRDDGRKETVRCCELDNRWVIPYNPYLLWLFNCHINVEACESIKVVKYLFKYIYKGHDRAFVAVTDANKADGDVDEIKQYRDARWVTPPEALWRIFSFDLSQNSPPVMQLQLHLENMHMVSCHERAKVNHVVQRPGADRSMLTAYFEANRLHEEARGILYRDFPEWYTLQQGKVWQRRKRNTGGQVGRIVSAHPAEGERFYLRLLLNHVTGATSYADLRTVDGDTLPSFREAAQRRGLLEADNTIDECLNEAAIYQMPSALRRLFATILVYCEPNDVAELWQRHLDSMSEDYHRSTQSKTHVQQMVLIDIRNILQSMGKDINTFPLPAIIDIYDDSHGTDREIYEEECIEPTIEDVAMKETLNEEQSFHIAWGRTAHSRFKISLTIDDGVVCSFTKQSGTTKLLQKASLIIWDEAPMTKGQAIEALDNSMRDIMGRPRLPFGGKTVVFGGDFRQVLPVVRKGSRAQIVAASLQSSYLCESMCHLKLVQNMRAQSDPWFAEYLLRVGGGTEETNNDGDVRLPDEMMYHSFDTAVDDPNNYYPSEFLNTLTPNGLPPHVLKLKVGCPIMLLRNIDPANGLCNGTRLV

SEQ ID NO: 82837 - protein, 181 aa, Zea mays
  Coding DNA Sequence Number=SeqID_41058
MAASIGRNNDVRPPLRELSNNTLEGIPTNKMPYVTSQQGFKMGKNNGLGGRANAMQHECPDMSISDGSIIDCTIPCDTTPGGRDDARQRKRERERVRYATMSAEKKNELKKRRESRKKGNVMHHEYSKVCNIPANKDNNNHQNNEIEDVDDDSYQLHKNNSFEVHRRLGSEKLSTHLSGAG

SEQ ID NO: 82838 - protein, 169 aa, Zea mays
  Coding DNA Sequence Number=SeqID_41059
MTPAAEAAGQLPSAHEADERVRALPTGGWAAVGVLRAGPQTLPAANPLNRSVDTHSMKMLQTLISVDAEKLENANRIRARGKGIDRKGVREGGAVNDEIDEALSSNKDGKEEASKDRFKVNMKVEGKGRLLKDKFKVRIYIEDINNARVKGDNRQGHKGKDEGTEEPVV

SEQ ID NO: 82839 - protein, 159 aa, Zea mays
  Coding DNA Sequence Number=SeqID_41060
MGHEEEGLDRLGTLATNPLNRSVDMHLVKMLLTLILTDLEELEVAKWTGARGKNSEKRKNLQGVREGGAVHDEIDEALSSNRDGKEEASKDRFEISRRDKFKVSIQVEDINIARVKGDNRQGYERKDEGIEEPAVQVQPRMGSRQDLNMAKMRLRLRAE

SEQ ID NO: 82840 - protein, 346 aa, Zea mays
  Coding DNA Sequence Number=SeqID_41061
MGGAEPGSFAEKDPSRATGVPVARRVGLGPRLACQKLEKRVHLARLHAACMAARPFCPLVWAEMGGRLAGSSRLPSPRMGDIRRLSASSLEERNSMGVAPGWGETDQAVVPPSASGAFVILAGAGAEASQGSTLTCGSANHLLFQLLVVAIVLPRCDGVVLQSCRGRRTVAVQLGCNIPSSPSHSGRGRQRRSTGALGGGPLFGFDGLFASLEWDREQKPSGDCVHLGPWLPLQRSLPRRPEVACILGDGTGVSDPSAALWWIEAGGSDISMNRGGVGSRMGNLVGRSLAVSPVSGAGAQVGQSRPRIGLAPLEAGCPRPQGRRRCRGCYGSPRREDPSLQDQIVL

SEQ ID NO: 82841 - protein, 314 aa, Zea mays
  Coding DNA Sequence Number=SeqID_41062
  Subcellular localization annotation: CTP_CleavageSite=2; ConfidenceScore=5.45e-01
MSSSSLKRRVFPSSKPPDGGYPPPFRLLVGGTQLHGSWYLSAIVRLQGFSSRSLAAPFRRWPPKTVTSSSWMGRDRPGCGPALSVGCVRHPRWGRGRGEPGLYLTCGSANHLLFQLLVVAIVLPRCDGVVLQSCRGRRTVAVQLGCNIPSSPSHSGRGRQRRSTGALGGGPLFGFDGLFASLEWDREQKPSGDCVHLGPWLPLQRSLPRRPEVACILGDGTGVSGNRLSRLLGPDSRRCPWTSAPPEAGSGFVVDVVDAEGATAPLGVKTRACRIRSSCSVRFLRPPRPEEHALVALAKLRPFFLLFRASGLCR

SEQ ID NO: 82842 - protein, 220 aa, Zea mays
  Coding DNA Sequence Number=SeqID_41063
  Homolog annotation: Hit_ID=Q75G59; Match level="QueryCoverage=37%, HitCoverage=12%, E-value=8e-17, Identity=63%"; Hit description =Expressed protein
MSGSKGTTGTVEVDAPTFSAFHLPCADLLVVLISRRSARRVNHRLAEKEIVVVLSSASAASIESSVAVVDHLTSLVSHLHETSRARKFVSLWCSLSDECLLDGGWRMGRETAGATCSDLKMSEGDATQLALEKGSPQVSNDDGSSSPATVHKLKVDTEDAGSKIESPTPEKLESRSKWVVVSSLARNLLAERYKDRFANQFLEDEGDIDDEDYNDSISQA

SEQ ID NO: 82843 - protein, 217 aa, Zea mays
  Coding DNA Sequence Number=SeqID_41064
  Gene Ontology: Mol. function=transcription factor activity; Biological process=regulation of transcription, DNA-dependent
  Homolog annotation: Hit_ID=Q75G59; Match level="QueryCoverage=53%, HitCoverage=20%, E-value=3e-44, Identity=75%"; Hit description =Expressed protein
  Pfam annotation: Domain name=CDT1; Domain location=71-194; Score =129.9; E_value=7.2e-36; Accession=PF08839.1; Description=DNA replication factor CDT1 like
MSEGDATQFALEKGSPQVSNDDGSSSPATVHKLKVDTEDAGSKIESPTPEKLESRSKWVVIIHLVFPVHNARHKDLLNLFNRMESSIRLLRLRKRMATFNNIATQVEILAKRKLSYCHLAQMKYLFPEAIQIKRVLLHDEKSLCMYADMKIILVMDVVEYTSPDHSPSMAICDAFYSKLLTFSDAHHKVPTKEQVDALSKELFALSTATVAAHVYRQ

SEQ ID NO: 82844 - protein, 208 aa, Zea mays
  Coding DNA Sequence Number=SeqID_41065
MAICDAFYSKLLTFLDAHHKVPAKEQVDALLKELFALSTVTVHLFNNRPSSHADLKLKVARRPHFGSAIAAIARYAPSPRPVPQFLPARQWKVPPLPQFAPSMPRPQSAGRQWKVAPRIPRRQRPQSPPRPQSPNRSRPQSSTHRRLLPAAASAPSPTDGIPTDSAPCRLPGSPECDPLSLNPRCLNPDRRPRSRSSSRHPTIHSPRP

SEQ ID NO: 82845 - protein, 144 aa, Zea mays
  Coding DNA Sequence Number=SeqID_41066
  Homolog annotation: Hit_ID=Q6ZD68; Match level="QueryCoverage=36%, HitCoverage=7%, E-value=6e-10, Identity=67%"; Hit description=DNA ligase-like
MAHVAPEILAADDAAPSTRFHVLPFPRLSERATEILAQARTARQLEPLIIRPSSQWSRLPRPSMESQGGSTRWGRGEWIVGWRDEDRERGRRSELRRRGLRERGSHSGEPGRRHGAESVGIPSVGEGADAAAGWAGSRRRCAEL

SEQ ID NO: 82846 - protein, 355 aa, Zea mays
  Coding DNA Sequence Number=SeqID_41067
  Homolog annotation: Hit_ID=Q6EPN2; Match level="QueryCoverage=30%, HitCoverage=21%, E-value=8e-41, Identity=75%"; Hit description =Fringe-related protein-like
MATLAKQANKGLLYLAELSQQAVVIGEMGEEYNQRYLHKGEYRETPETGIQWVTNCMGRPSARTTSTAPKLRLRDGRHLAYYESGVPRDQARFAVVFSHGFTGSREDSVSASQVPTDPSTTTTLSTSPSLPHLLPDPYAGLRFTRPPGSWTYGRDLERVSAGVLGTKTTWQRVPFSLVASTPLTGPNSIIGRAVVVHVAPDDLSYNQYIYLFMGLSAIRISSDTSAFPYTHRRGHRFAIRISCIISETFRLGLPSVRWFVMGDDDTVFFPDNLLTVLNKFDNRQPYYIGSLSESYLQNIYFSYGMAYGGGGFAISRPLAEHLTLKYALWLSSNIVLQSAFKDPRPHNGHGCYSTI

SEQ ID NO: 82847 - protein, 136 aa, Zea mays
  Coding DNA Sequence Number=SeqID_41068
  Gene Ontology: Mol. function=transferase activity, transferring glycosyl groups; Cellular component=membrane
  Homolog annotation: Hit_ID=Q6EPN2; Match level="QueryCoverage=79%, HitCoverage=21%, E-value=1e-41, Identity=75%"; Hit description =Fringe-related protein-like
MGLSAIRISSDTSAFPYTHRRGHRFAIRISCIISETFRLGLPSVRWFVMGDDDTVFFPDNLLTVLNKFDNRQPYYIGSLSESYLQNIYFSYGMAYGGGGFAISRPLAEHLTLNLRSRTPDPTTGMVAIQPYDKSSL

SEQ ID NO: 82848 - protein, 150 aa, Zea mays
  Coding DNA Sequence Number=SeqID_41069
  Subcellular localization annotation: CTP_CleavageSite=54; ConfidenceScore=5.33e-01
MKFKKRRPLPPFIGRARLFGKPAIQQGAALRETRNPTVRRQSTVTSKTPAEPLRARAASPPSSDVFGTSRWSDRDNRQGHPSLDRHQTKTGDDVIPQCGLVQLRGPRAIRPIVTGPAWPPRVTGLICKGIPVITVCIPALWEYSGDNLGS

SEQ ID NO: 82849 - protein, 103 aa, Zea mays
  Coding DNA Sequence Number=SeqID_41070
MASLRTVGGGGQSASLALDLRRTRARRADEQQDGGRLGFSRSAESKVQIAPAPAPFYRQGAALRETRNPTERGASGNPQSNIFENESPTPGLATPLDTSKVNG

SEQ ID NO: 82850 - protein, 165 aa, Zea mays
  Coding DNA Sequence Number=SeqID_41071
MEIRCDYLIECHLQMKKTSIHPEGQIFQPAASISNSCCGYGSKIGNLGQNPFVPNDSKRDWGCSCSSDPSRQESCYYGQLQTPTEATLLQTPVSAGKLRTNHHENQIEWRQGATKDARGRRRSEGKSANPQSQQETLTSTWESQSQETRQEEEPTTNGLGLRRAA

SEQ ID NO: 82851 - protein, 155 aa, Zea mays
  Coding DNA Sequence Number=SeqID_41072
MPLQPHIFGKKRDEPDQFLSSKKMEIRCDYLIECHLQMKKTSIHPEGQIFQPAASISNSCCGYGSKIGNLGQNPFVPNDSKRDWGCSCSSDPSRQESCYYGQLQTPTEATLLQTPVSAGKLRTNHHENQIEWRQGATKDARGRRRSEGKSANPQS

SEQ ID NO: 82852 - protein, 109 aa, Zea mays
  Coding DNA Sequence Number=SeqID_41073
MASCNQYIQLFLQNVLFRDFLIIWRRLVDAMLDCQKFGLPVLTKPGTEKKSRKKKIQGENDPALEKEQAKCRKRVKSLVKRRKMSEAQRLVQQELELEEWGTEAQVKHP

SEQ ID NO: 82853 - protein, 250 aa, Zea mays
  Coding DNA Sequence Number=SeqID_41074
  Gene Ontology: Mol. function=DNA-directed RNA polymerase activity; Cellular component=mitochondrion; Biological process=transcription
  Homolog annotation: Hit_ID=Q9SYW4; Match level="QueryCoverage=73%, HitCoverage=19%, E-value=4e-88, Identity=88%"; Hit description=T7 -like RNA polymerase
MVKAYPTVNEDYLKAVDKAKRKLRGLIAEKNCAPLMLCLALLESWQSRTSLSLHRKVAFLVPPKKSRKKKIQGENDPALEKEQAKCRKCVNSLVKRRKMSEAQRLVQQELELEEWGTEAQVKLGSRLIELLLDSAFVQPPADQTPDSSPYIRPAFKHVLRHPIIENGRLKKKHWVIECDHLVHEGFESTAWHVDIPNLPMLVPRKKWKGYDKGGHLFLPSYIMRTHGVKDQKDAINSVPRKQLRKVFEVY

SEQ ID NO: 82854 - protein, 115 aa, Zea mays
  Coding DNA Sequence Number=SeqID_41075
RICPGVSQLSDSPRCQEEPPEKTVHASVKLPERGIGLCFTGEAGPRSPDFNRPPATVDRDPPRANPTLRRNSLAAEYILVPEQGAAQEVAPDPAPEPAPEDLPATALEGKPRFYA

SEQ ID NO: 82855 - protein, 151 aa, Zea mays
  Coding DNA Sequence Number=SeqID_41076
MTMDKKGKRVSKCASMGRICPGVSQLSDSPRCQEEVCGGLLQRFARMRPLATFEHWKKQTATCSTPSAAPEHARARARAAPKPSQRPAIPSPVQPPEKTVHVSVKLPERGIGLCFTGEAGPRSPDFNRPPATVDRDPPRANPTLRRNSLAA

SEQ ID NO: 82856 - protein, 133 aa, Zea mays
  Coding DNA Sequence Number=SeqID_41077
  Subcellular localization annotation: CTP_CleavageSite=33; ConfidenceScore=5.73e-01
MTPTHASSSLLRAPPVPRVHPSPHFAQLRPFSRSAHAASRRRRPVPAFPAIRLAGDRSKPPELRPEVRHPSPCPISLIAPCARPILPSSVLGRGDNEQLVVPQCVAEDPSEQQPGGEVGNMDDFEEFLEYDEF

SEQ ID NO: 82857 - protein, 334 aa, Zea mays
  Coding DNA Sequence Number=SeqID_41078
MMINNGDYNPDLWYFLLEGVPLGGEVGNMDDFEEFQEYDEFYSTLTPVLTVSLVDGPYQQEVESERPPSPAPQPEMPPAPPQGIPAAGGDPDGDRDDDDAGGSSSHGTELSEEPEPNGWIVRPITRDAARGCHFHDALDTLLRRAFDRHTWSIEYRCVVYQHRRGLYPDQWEATCLVRRPDDDLQGVEAFSEHYSITERDTAEAAMQDAARRALSQYCSLFSGVADGLDLKYYPRRSTGSVGGVIVSLVGEGNPRLSGMVNLVTVLNTELDHTLDELGKVRAKVAELRAECAARHYLDDGSPAPVGIQHPYRSPPRGRFDYGTPDCRTRIDLYP

SEQ ID NO: 82858 - protein, 155 aa, Zea mays
  Coding DNA Sequence Number=SeqID_41079
MTSHGSSEDGNALSHTDGLAREGFPRILWEVLQGARYTTPPQYAVQQFEKHRVPRGRVRMTLEPHPLQPGWRSLDSESFGYRAEDTIEAIALHGLTTFCGFHLLGAFGFRRYLRTRIREGEAQKIRRLTQRRSCEAGKLRHVRRKGNRLEDEKAI

SEQ ID NO: 82859 - protein, 54 aa, Zea mays
  Coding DNA Sequence Number=SeqID_41080
MAPPVSDPVRYLRTRIREGEAQKIRRLTQRRSCEAGKLRHVCRKGNRLEDEKAI

SEQ ID NO: 82860 - protein, 96 aa, Zea mays
  Coding DNA Sequence Number=SeqID_41081
  Subcellular localization annotation: CTP_CleavageSite=64; ConfidenceScore=5.36e-01
MVVPQAACLSAPVAGRSIQTNMVNPQRFLANSIYTGVHTERQIGVLGRRRRRYPSLQPSSISLRQQEAERPARSTLRLLHYKTKAYDDIAPSHVLT

SEQ ID NO: 82861 - protein, 223 aa, Zea mays
  Coding DNA Sequence Number=SeqID_41082
MEAKQPARSTLRPLHYKTKAYDDVAPSHVLTQPGGPCGIQPISVTLLYGNIPGTVQVPEDNQNRQIDIQRRRFTFALNPILIARPRPTDQIARGEGGSRMTDNAARRMMNPDEKLLAPRWLFDHRDTAHSHHTEQRSLDPKIRRQCVHGGEPRPAALEEGEGKTAPPAMHGIRLKEQLTTPAHRSEKRSRDVRGSNAPGGWVQDASEYAIARGATTCGSRLSV

SEQ ID NO: 82862 - protein, 443 aa, Zea mays
  Coding DNA Sequence Number=SeqID_41083
  Homolog annotation: Hit_ID=Q5QLC5; Match level="QueryCoverage=16%, HitCoverage=24%, E-value=1e-11, Identity=64%"; Hit description=NLI interacting factor (NIF) family protein-like
MAGPALKLEPHILLKECTCVKFQFYLSYAEFRRLALITFQKHMTFKDVDWFRCEDLLLDLIICSKVQSRCISYKKPIYTVHLYASNHHRPSGRLRFKPPPSIDRNCSSLRSPLPQQLDPPSVFIRVVVGNSSGLPTPPSNLPPTLLPTPLPLPPPAKTPRTRARARRPTTTTPPPPLVASGLAIPLSSTSLRPPGRGVLADRGGGGAAAAGEGGVAGVAGGGGVDRLPCSGSALDPSGHAVLRPALSFVGVLYSLLSGPAASNPSPEVASIRPALSRALGNRCHIRSASPWTPSATPGDALRPPPTAAWEWLERCSCCDDGGGDHDGEEDGVKSGGHVDYLEMSDEELMEQCDMGTFKASGPGASDTADSSSPSPTRTALLDLRRGHAALWLCDTAGAQRHAESDLVRLVSPARPGVRLPQAAVPVAPASERGIALPIGHRWR

SEQ ID NO: 82863 - protein, 150 aa, Zea mays
  Coding DNA Sequence Number=SeqID_41084
  Gene Ontology: Mol. function=translation release factor activity; Biological process=translational termination
  Homolog annotation: Hit_ID=Q9C815; Match level="QueryCoverage=96%, HitCoverage=62%, E-value=3e-34, Identity=50%"; Hit description =Peptide chain release factor, putative; 8726-9996
  Pfam annotation: Domain name=RF-1; Domain location=5-115; Score= -28.8; E_value=0.011; Accession=PF00472.11; Description=Peptidyl-tRNA hydrolase domain
MSDEELMEQCDMGTFKASGPGGQHRNKRESAVRLKHLPTGIIAQKRNYSASVRRPINLEDYTPPVEILQILPLKSSVRGKDVGPQIGPNNSKFSPEMQALLDLLFAVEGSVSDAAKILGLSTGALSRLILSDDSLRTAANELRASKLFIV

SEQ ID NO: 82864 - protein, 206 aa, Zea mays
  Coding DNA Sequence Number=SeqID_41085
  Homolog annotation: Hit_ID=Q676Y4; Match level="QueryCoverage=32%, HitCoverage=29%, E-value=8e-10, Identity=50%"; Hit description =Protein tyrosine phosphatase
MGAPDSPGAPPDSVRLSTGALSRLILSDDSLRTAANELRASKCFFDCRAPMLYYVLLTLQDSVHKVFYAVVEAAAVRADNNHLGGLVRYPVSTTLPQIGSRLFLTWGVFWSFPEVHKVQHKPTKKSHFTKNHRTIRYATRLSGAPTEQQSSSPTVDCIDDSTMNRAEVRTVKSERTGLSGASRGQRTSTVNRSKPQRSADVARTGQ

SEQ ID NO: 82865 - protein, 263 aa, Zea mays
  Coding DNA Sequence Number=SeqID_41086
  Homolog annotation: Hit_ID=Q676Y4; Match level="QueryCoverage=24%, HitCoverage=29%, E-value=3e-09, Identity=50%"; Hit description =Protein tyrosine phosphatase
MLYYVLLTLQDSVHKVFYAVVEAAAVRADNNHLGGLVRYPVSTTLPQIGSRLFLTWGVFWSFPEVHKVQHKPTKKSHFTKNHRTIRYATRLSGAPTEQQSSSPTVDCIDDSTMNRAEVRTVKSERTGLSGASRGQRTSTVNRSKPQRSRLRPLKGHDLASPEPSLGQEQQTQENSAACPAPTTVPPARVRLTAAKSSLRRHRKLCLARPQGSDSTSTQEDGLRLARPRGSNSTSTPKDGLRLARPQGSDSTSTPEDGLRLARP

SEQ ID NO: 82866 - protein, 123 aa, Zea mays
  Coding DNA Sequence Number=SeqID_41087
MSTAVFPSDDAVFPKLRCDNVQLAETGSFTSTRGCRNMDQRDVNGPENGWPRTNKVNWEMPPRSDQTPRCVAPPEPPVLLLWGECETVRVSSHMIIAQQVVGKPVCMNSPKVGVHVMCKANQQ

SEQ ID NO: 82867 - protein, 245 aa, Zea mays
  Coding DNA Sequence Number=SeqID_41088
  Homolog annotation: Hit_ID=Q9XES0; Match level="QueryCoverage=28%, HitCoverage=16%, E-value=4e-29, Identity=91%"; Hit description=1 -deoxy-D-xylulose 5-phosphate reductoisomerase, chloroplast precursor
  Subcellular localization annotation: CTP_CleavageSite=45; ConfidenceScore=5.05e-01
MALQTPCASRNILTSAPVRHRRLHEVLGFPGRRHDRRTRPPPSLRAFATALAKRPCQGSSQLLPSALQSHQPFCGSALGAALMSLTEAPSPSPSSSSGSDDFAAFLASELELASGADSAFPGDPSSIFPDTDDEGEDEDLEELEGLEVIEAHYLFGAEYDDIEIVIHPQSIIHSMVETQLSWDGQICRYQSYTPYHGQIESIALRSPGPIWIFASMTSSNSCDSCAVQLMLLFGNDLQEFKSYFS

SEQ ID NO: 82868 - protein, 216 aa, Zea mays
  Coding DNA Sequence Number=SeqID_41089
  Homolog annotation: Hit_ID=Q2L8A8; Match level="QueryCoverage=26%, HitCoverage=13%, E-value=4e-22, Identity=94%"; Hit description=1 -deoxy-D-xylulose-5-phosphate reductoisomerase
  Subcellular localization annotation: CTP_CleavageSite=45; ConfidenceScore=5.05e-01
MALQTPCASRNILTSAPVRHRRLHEVLGFPGRRHDRRTRPPPSLRAFATALAKRPCQGSSQLLPSALQSHQPFCGSALGAALMSLTEAPSPSPSSSSGSDDFAAFLASELELASGADSAFPGDPSSIFPDTDDEGEDEDLEELEGLEVIEAHYLFGAEYDDIEIVIHPQSIIHSMVETQLSWDGQICRYQSYTPYHGQIESIALRVTWAPSGSLQV

SEQ ID NO: 82869 - protein, 84 aa, Zea mays
  Coding DNA Sequence Number=SeqID_41090
MSKNTRDTKFIPRFGHTTKVPYFLVEAPTKSRVSFNPNPPFADHKDLKWERQEVCEREWEVFLRLEMEFCACSSVGKRGGSEYI

SEQ ID NO: 82870 - protein, 103 aa, Zea mays
  Coding DNA Sequence Number=SeqID_41091
MVRERRTQTKTMSKNTRDTRFIPRFGHTTKVPYFLVEAPTKSRVSFNPNPPFADHKDLKWERQEVCEREWEVFLRLEMEFCACSPVGKSVGGVYKGAPKAGGR

SEQ ID NO: 82871 - protein, 92 aa, Zea mays
  Coding DNA Sequence Number=SeqID_41092
MSKNTRDTRFIPRFGHTTKVLYFLVEAPTKSRVSFNPNPPFVDHKDLKWERQEVCEREWEVFLRLEMEFCACSPVGKSVGGVYKGAPKAGGR

SEQ ID NO: 82872 - protein, 196 aa, Zea mays
  Coding DNA Sequence Number=SeqID_41093
MVRERKTRISTMNKNTRDTRFIPRFGHTTKVPYFLVEAPTKSRVSFNPNPPFADHKALKLTQRFLSKDLKWERQEVCEREWEVFLRLGMKFCACSAVGKSVGGVYKGAPKSWWPLGKVDKNRLNRFVNRLNRFPPGRTRFTDLLSRRVDRTQNRLSRAQIRLNRFSQNLHMTFSDRTDWQTGSDRAEQCRNRLNRF

SEQ ID NO: 82873 - protein, 151 aa, Zea mays
  Coding DNA Sequence Number=SeqID_41094
  Homolog annotation: Hit_ID=Q6QP51; Match level="QueryCoverage=34%, HitCoverage=28%, E-value=1e-16, Identity=86%"; Hit description =Putative growth-regulating factor 1
MQVACNRTAVAHPFGFVASGMEAQAHTSCNQRAGYYVQETAPPLAPMPRLLDCGTGAATRGSPARDPTVPIECNDHGDQERGYFERDPSPRRKWAPSPPTDQGFEGWPLGRVRQPPQSTRASSPLLIRGSKAGPSEGFNSRPRALGLHAHY

SEQ ID NO: 82874 - protein, 534 aa, Zea mays
  Coding DNA Sequence Number=SeqID_41095
  Homolog annotation: Hit_ID=Q6QP51; Match level="QueryCoverage=74%, HitCoverage=99%, E-value=3e-24, Identity=56%"; Hit description =Putative growth-regulating factor 1
DRERGRCGKDPSRRRKRAPSPPTDQGFEGRPLERVSTAAPEHSGFKPITDQGFEAAPEHSGFKPITDKGFEGWPLGRVRQPPQSARAPRPLLIRGSKVGPSEGFDSRPRACRVRDDSGYVRYIAEARATLPSVPLGHQPTPNERGTGVHSDHPLAAHWKHHVRHSPRATWRFPPSSLQKGDAGAYDKKARGLLSHPATTKLLIASTNQLDNLEPDHASGLRLGRMRERSDRPRHHERHSDLRGVKPLLRGLEGYTRRVRSRTHQNKAKPRKVGPLTENAAKASKRVPTLPSRLGGYYRVPPTLLITAAGASSALPKPGSGRLRCEATLAGPPHQPTASQAHSMQGMPDAENSIARPAPTAVPTTQAKLTTSHNQPPSSVSGTTGSSASPDLKLRPREEVSASALPPGLGFDLVFGRNRLFAVPAFSLKRSIHLARPWARTDRANRGYIITLSLASSGYKEQDRRPIWLTPATGNDGAPRATMTLVALSPLRQQGDVSRIPATLPAVLLQGSGASPTATLSRVQGSSFSPTTTLA

SEQ ID NO: 82875 - protein, 118 aa, Zea mays
  Coding DNA Sequence Number=SeqID_41096
MEHKNYSSQAHSKIPLQRFEMGEARDVCEGEGGVSWVRNGVQIVLTAVGREVGDYRSEVRGVRDQLNCPSGPVQPVLTSEFRRENPSSTARRQVQLVYGQRGSQRKLSSAEVEKAQLS

SEQ ID NO: 82876 - protein, 118 aa, Zea mays
  Coding DNA Sequence Number=SeqID_41097
MEHKNCSSQAHSKIPLQRFEMGEARDVCEGEGGVSWVRNGVQIVLTAVGREVGDCRSEVRGVRDQLNCPSGPVQPVLTSEFRRENPSSTARRQVQLVYGQRGSQLKLSSAEVEKAQLS

SEQ ID NO: 82877 - protein, 83 aa, Zea mays
  Coding DNA Sequence Number=SeqID_41098
MALIKVKTRFEGHCEIAHTPFRPFKNEIGFLTRPLTPFPDDEEEARKDEGNIPEGETAEQISNPNLLVRWSSSGSRVQAFLIG

SEQ ID NO: 82878 - protein, 142 aa, Zea mays
  Coding DNA Sequence Number=SeqID_41099
MGHHALKAAIHVCLEPLLHVLKVRIKIAWTRLPKLLRMRRRWRRRHLLSYISFKSNSFIIASFFLIIWERSKRPGEESNLILERPKWSVSYVAEPPKLLGPHAHVLVSKTSDGYACAQDNLTGSVRVSQGPRINHLQPISQD

SEQ ID NO: 82879 - protein, 133 aa, Zea mays
  Coding DNA Sequence Number=SeqID_41100
  Homolog annotation: Hit_ID=Q942Z3; Match level="QueryCoverage=49%, HitCoverage=18%, E-value=8e-21, Identity=77%"; Hit description =Putative shock protein
MMSGVVPSSLHVLLRAERALRERDVGEVHIPLSELLSGAPDGPVPAKFVAYQVRKISSGKPQGVLNLSYKLGEVANGYAPAPPPSPPTPSLHRPPRTRLLQARLMPTRLPPRTRLLQARPTLVILQALNNRDI

SEQ ID NO: 82880 - protein, 83 aa, Zea mays
  Coding DNA Sequence Number=SeqID_41101
  Pfam annotation: Domain name=Zim; Domain location=4-39; Score=74.2; E_ value=4.3e-19; Accession=PF06200.4; Description=ZIM motif
MSNPSANPTQLTIFYGGSVCVYDSVPPEKAQAIMLIAAAAAAAAATKGSAATAFNPPMISPLPGGTLSSASLRNVVTGRVKIK

SEQ ID NO: 82881 - protein, 61 aa, Zea mays
  Coding DNA Sequence Number=SeqID_41102
MASGVLSQLYHQGVEVDALVRVEVWSGLKNPRVHGFGYYRNKPVPINPLGTDLCPLTNPWV

SEQ ID NO: 82882 - protein, 1081 aa, Zea mays
  Coding DNA Sequence Number=SeqID_41103
  Gene Ontology: Mol. function=protein serine/threonine kinase activity; Cellular component=cell surface; Biological process =protein amino acid phosphorylation
  Homolog annotation: Hit_ID=Q6ZIQ9; Match level="QueryCoverage=65%, HitCoverage=94%, E-value=0.0, Identity=58%"; Hit description =Putative lectin-like protein kinase
  Pfam annotation: Domain name=Lectin_legB; Domain location=360-627; Score=238.4; E_value=1.5e-68; Accession=PF00139.10; Description =Legume lectin domain
  Pfam annotation: Domain name=Pkinase; Domain location=713-998; Score =158.1; E_value=2.3e-44; Accession=PF00069.15; Description=Protein kinase domain
  Pfam annotation: Domain name=Pkinase_Tyr; Domain location=713-998; Score=101.3; E_value=2.8e-27; Accession=PF07714.7; Description =Protein tyrosine kinase
  Pfam annotation: Domain name=Zim; Domain location=179-214; Score =74.2; E_value=4.3e-19; Accession=PF06200.4; Description=ZIM motif
  Pfam module annotation: Pfam domain module=Lectin_legB::Pkinase::Pkina se_Tyr::Zim; Domain location=360-627::713-998::713-998::179-214
MMSGVVPSSLHVLLRAERALRERDVGEVHIPLSELLSGAPDGPVPAKFVAYQVRKISSGKPQGVLNLSYKLGEVANGYAPAPPPSPPTPSLHRPPRTRLLQARLMPTRLPPRTRLLQARPTRSRTIAFYPRVRAHILSYAGFEPTTWLSDMLLSEPVVGVTWICLLSIQRSAMLPMSNPSANPTQLTIFYGGSVCVYDSVPPEKAQAIMLIAAAAAAAAATKGSAATAFNPPMISPLPGGTLSSASLRNVVTGRVWSGLKNPRVHEFGYYRNKPVPINPLGTDLCPLTNPWENNISENRDVPVYYPVLFGKAGHLKIQSQGCKLAPFFFLMVVSKAPYSPAKSFDGMESAGMEMTVDGKQGARPSILKGRPPASPFPKFDQNRLQLSTNLTFTGNSTVSQGALQVTPDSGNNFSTYLANQAGRVFYSTPFVLWASNASSAAAAGRRVASFSTVFQFNLYRTNASVKGEGLAFVVASAIADPPPGSHGGFLGLTNASTDGLGANGFAAVELDTVKQPYDPDGNHIGLDVNGVRSSSATCPLAALGIELAPADTGASDGSNFVWVDYDGAARRLRAYISPNATKPSAAALDASLDLSAVVAARDAYFGFSASTGADDYQLNCVKMWNMTVEVLHDDDDRLPKKLSGWKLGLAVGAPCAAALAALALLAGLYLMKKRRKVGDDPSSVSHSAIDLRSIPGVPKEFDYEALRKGTNGFDDKMKLGQGGYGVVYRATVPGDNGRSMEVAVKQFSGANTKGQEDFLAELGIINRLRHRNLVKLIGWCHQDGVLLLVYDYMPHGSLDRHLFGGREASAAATTTTTLDWKQRYNVVAGVASALNYLHHEFEQTVIHRDIKPSNIMLDSSFHARLGDFGLARALESDKTSYTDKLGVPGTLGYIAPECFHTGRATRESDVFGFGAVVLETVCGRRVSCDNPAGCSQLLELVWRLHGAGRLLEAVDPRLAAGGYGYDGEEAERLLLLGLACSHPNPRQRPKAQAILQNLQTRSVPPLPVPMSKPVFMWPAPLADGEEDATQASSMSRSGVTSSGVTSSSNYPYTWSSSGYNTQTFQVSREVHDAAERDVATV

SEQ ID NO: 82883 - protein, 74 aa, Zea mays
  Coding DNA Sequence Number=SeqID_41104
MESTCSSPSKELSKRRTRSKLPRLLSRISPQPQLLKASPGTIQEMVDGVTWPTTLPPGWTVEWDAALAGEEHEE

SEQ ID NO: 82884 - protein, 360 aa, Zea mays
  Coding DNA Sequence Number=SeqID_41105
  Subcellular localization annotation: CTP_CleavageSite=37; ConfidenceScore=5.33e-01
MAPRTLLDDGGSRPPYGSKKTSARTRQPRQLSFRQAPALLRWPRHHTNRVPKPLRLPQRHGPLTEGWPCGDEDETGARVRPLAPSPAWTLVTPYCKRTRPGRGTNTKAAGFPPLSRPSPATSLPPFALGLAPTHLGWGTRRHSLVGPGTPRSRNADKREILDSSLGSLLLVLLLNSSLLGDEHAGELVGGEESGLSRAKLTNQMGKRASPGIKEGPGLGKLHGPLAELTEALARLGRFGARKSGLSPCSNPRQIQGFVMSRARVPNAIFWHVTEGFLNLYPPGVAPEASEEWFDSLESTVWPEPGLREQPPSLRTEREDGQGQARLFSYAPASPFRKEEGGSAILPSEGADHGVSSEMIT

SEQ ID NO: 82885 - protein, 61 aa, Zea mays
  Coding DNA Sequence Number=SeqID_41106
MGGMFLKIKLDGGSIMAMMGSTSEKMYLCQVRKRQIFVASVQRWYPKTSTKTRAAGGKALH

SEQ ID NO: 82886 - protein, 46 aa, Zea mays
  Coding DNA Sequence Number=SeqID_41107
MAMMGSTSEKMFLCEVRKRQTFVASVQRWYPKKRTKTRAAGGKALR

SEQ ID NO: 82887 - protein, 35 aa, Zea mays
  Coding DNA Sequence Number=SeqID_41108
MGRMATGILQQRRAAGLTETQTAAGLIHRRIQGTQ

SEQ ID NO: 82888 - protein, 368 aa, Zea mays
  Coding DNA Sequence Number=SeqID_41109
MAPPKLYDGGGSQLSYGSRPEYALSWDLETPLWAARTPYGRVRLAHVEVLDQPWRSGLYIQGSGALPWGSRLTVDALEYITFSGHVAAPYPPIWWAQALLWSQSSRPRLGRVMVWSHIQLFTKRLKIAAWYSQTTRRERGIQGSAHYLGSCGVLTPPPYESLLNPQLDVVEGFRSPFSLGETPSTRRASQGIPHDSPEASLRPPQSHGSAITIKRSRRARVAPDESARNFTAGEDEGADVPWWPHHCNRRVEEANVEEGARNTEVARTQSLPMICDTSLPLATARFQWIQLSARRQRRKVDAGPEHGARKSVARGACSVPRWTDDLTMGPTNQCRERHQGVRPAGGSGVSAPTIETELVVGRKAGHAE

SEQ ID NO: 82889 - protein, 98 aa, Zea mays
  Coding DNA Sequence Number=SeqID_41110
MEHPNAFGSARRAFLEMMLRVDRVGALYRAKATKIGGMVATVSEFGGRSGHGARAAKAASWGCGEILDGSLGSLLLVFLVDSSLLKDEHVLSVNEIAI

SEQ ID NO: 82890 - protein, 321 aa, Zea mays
  Coding DNA Sequence Number=SeqID_41111
  Subcellular localization annotation: CTP_CleavageSite=43; ConfidenceScore=5.05e-01
MAGLNKKKRRGSSTNRTGRRGLDLGFIKPVRNPIPRIQKQRPRFKTPKTRSHPINPSRTVEIQNALSLSHDLISAGPNQINGRSPSCPHAIPSSAAAAAAPPNTAWHADEEKHQPPRCPNPYGSKRIMGRRSWQIRTNHPYLNWRGTILRTRCTMAHHGNLFSGEKFTEHQELPSPANTADRFPEGRQMAQTRSRFRNTVTTTNPRWRSNPNAFGSARRAFLEMMLRVDRVGALYRAKATKIGGMVATVSKFGGRSGHGARAAKAARFVPPPDSVAREELIAGGVPPTVRRKREHTTKGWIVGIRCQWPRGVMRGRGGLRA

SEQ ID NO: 82891 - protein, 178 aa, Zea mays
  Coding DNA Sequence Number=SeqID_41112
  Gene Ontology: Mol. function=N-acetyltransferase activity; Biological process=metabolic process
  Homolog annotation: Hit_ID=Q337G6; Match level="QueryCoverage=84%, HitCoverage=93%, E-value=6e-58, Identity=69%"; Hit description =Acetyltransferase, GNAT family protein, expressed
  Pfam annotation: Domain name=Acetyltransf_1; Domain location=77-156; Score=65.9; E_value=1.3e-16; Accession=PF00583.14; Description =Acetyltransferase (GNAT) family
MDGTLVVAEHGEPSSVMAAAEAAPPPILELDPSHDRAVSVVEDIVRLERRIFPKHESLARSLHDELKRRNSGLIYKTSSADGGEVIGYAMYTCNTSLCATITKLAVKENWRRQGHGEALLSGAVERCRRRKVQRLSLHVDPTRTAAVALYCKAGFQVDTTVEGYYAPHRDAYRMFLDL

SEQ ID NO: 82892 - protein, 235 aa, Zea mays
  Coding DNA Sequence Number=SeqID_41113
TILALNAPAIRSVGEAIWPRLLLREACPSWASGKSKPIRPLQLCADGGYQPSLGVLRLRHFRTHELDLACFRQLRHFLAPDLDVWDSIPNEETRGEYEPSASPLSSVFPIHRSGALHRSFDEDSNDYSSIAPHGDAAKGTTTTTTKPSTMPSVVAHIGACSTMRAPCPAHRQTHPAAAHTRLLMAEAERRHGSDTVWNGEEPKWRLDQSGLGRSQANQYEKGFLTLTISIEDTFD

SEQ ID NO: 82893 - protein, 169 aa, Zea mays
  Coding DNA Sequence Number=SeqID_41114
MPSVVAHIGACSTMRAPCPAHRRTHPAAAHTRLLMAEAERRHGSDTVWNGEEPKWRLDQSGLGRSQANPANLRCHAIYSLPKVSRRTRSASPAQSTRPNLQSRLRGKVCIDGIIEAIKCHALVRHQLPSFSALSQEDYSQFWIVGRVQFYERNAFAPLAFSDRNLGVDC

SEQ ID NO: 82894 - protein, 361 aa, Zea mays
  Coding DNA Sequence Number=SeqID_41115
  Subcellular localization annotation: CTP_CleavageSite=87; ConfidenceScore=5.57e-01
MDSGGSAAGGGVWTPHCIPVATGAGTTTASTHCSGSCSPFAISTSALWSSGPSLPVVGSLLALLMPPRGRIIFHRPSPKWGGPIFLLQSEGPNGPSIRPPRRPFGGGGGEWRDKPRRELPLRCTAQRSAHQGRRSAQPPSGRGRGRRQGGRARFALCVGAVWPHAWPATARTGQARQRATAPPGGARREARGAAPSRPRPGALGAGLLLQRRGNEAPARALGAAPKGARRGLLGRGNEAPARALGAASSSRGAGTRPRRGRSARLPRALGAASSGAGTRPRRGRSARLPWAPGARLEAPFTRRSALVRSGRRRRTRAAAGSSLLPGGGQEHPWRRLCDWAAFLAAAWLAWQAAWTTFRGLI

SEQ ID NO: 82895 - protein, 34 aa, Zea mays
  Coding DNA Sequence Number=SeqID_41116
MGWPARLGRRAGLSGRCLARLAGRLDHFQSSKLS

SEQ ID NO: 82896 - protein, 446 aa, Zea mays
  Coding DNA Sequence Number=SeqID_41117
  Homolog annotation: Hit_ID=Q6QP51; Match level="QueryCoverage=40%, HitCoverage=99%, E-value=7e-24, Identity=39%"; Hit description =Putative growth-regulating factor 1
  Subcellular localization annotation: CTP_CleavageSite=75; ConfidenceScore=5.14e-01
MAEKYQLPRSCVPPTTTRRKDRGRSPSEGSKAVAGWVFTNTLQGPPPTTWGLGSTRHASWPRIEEAKPPCAVRVTAQRLQALLHFRLDQRVKGRTAMQVACNHTKGAHPFDSDASSVGAQAHTSCNRRAGYYVREAAPPLAPVPRLLDYGTGAATRGDPAHDPTVSTEHIDHGSVSRGRRRDGRSGQKWAGSDGGGRRVEAAVKSSASSREAGNGFTSAIMTASKKDRERGYSERDPSPRRKRAPSPPTDQRFEGWPLGRVRQPPQSTRALSPPTDQRLAPEGFDSRLRARRARDDSGYVRYIAEARAMLPSHFAAPLTDLTGKQRRLLRSDCCATRQTSTSEDGLRLARPRARTQPRPQKTDSASPDPRARTQPRPRKTDSASTLDDGLRLARPSSPDSTSTSEEPPPRPTSGSDRPRHRGAIITLPLASSGYREQDWRPIWLTP

SEQ ID NO: 82897 - protein, 206 aa, Zea mays
  Coding DNA Sequence Number=SeqID_41118
  Subcellular localization annotation: CTP_CleavageSite=22; ConfidenceScore=5.35e-01
MGSTRVAFVLSSSGERNFAEVGSSAASPRRWSPKTVTTSLMVGRSKPGCDLCLALSFKDLHHPGWGGGRTEPELYLPRGFVGHLLPQHSGERALTGLAGGSDFDNAGLVGGERRLLQRVGLAGSAGSGSAPGAPSRRESGCRTARTGGPPKMSRAARAAFVFLGCPVFAPVRRLYAEVGARPSGRIRVGICRWADGFRRRRGGGGG

SEQ ID NO: 82898 - protein, 868 aa, Zea mays
  Coding DNA Sequence Number=SeqID_41119
  Gene Ontology: Mol. function=cysteine-type peptidase activity; Biological process=proteolysis
  Homolog annotation: Hit_ID=Q53MK8; Match level="QueryCoverage=48%, HitCoverage=44%, E-value=3e-31, Identity=24%"; Hit description=Ulp1 protease family, C-terminal catalytic domain, putative
MKSVDRPPANPKRITIESSQEFFSVEIPRPASIGVPPNTKHSDQCPAPVEKPSVIYEANEQTGSGNDDDDFMNLQRSKLNVRCNPQDVIITIKILNERQRQAVARKGFSNILDMTLDALGSRSHLRWLMDKLDHKDMTIRPGVGKELKITKETVHLILGLPNAGGGKPLGIDEAVAGNNLRAELGLSKDEFVVASLQDRLRKGNDDDLSIRCFFLILFNRLLFPTSSWGISNHEVLLTEEMDRFHEIDWCHLIFNDLCEAAQKWHTRSTSNVSTTIYGCSVVILLYYLDHLHDAAAPPNKRGTPRIKFFDKNIIQALTKADKRKPRQSGEPFGHCEFRSFSETCYSAVPSVQFQSEHRDRTNIFDVPRPDPCGHHTIHIQLPLIKDMLSSKIKQLQPRDRPKFIEKFVEYDSEVGKACSVIKSTLTKMVVKQYELADTFAELIDDVLRAESGDPDNVAEAPQTDKPPDISQHMSSEEQTHEGTQNTQDMTMPSQPNTELTGTQFEEIHEKQQQMRRAFEGCPDDLETNITPNAENQGGDIGPSHDTPTFTGPLFDQTPSGHVADGEETHSLHTTHDHSVPRLTELDCARSLREFLCSSKADPNRNIIEFDECIGNCLDMQQSFADGMCLDNVFMQCFIMGFRHDKNNSCSSINKDRLVLDVNVGILLNFEEHERYSKSPQIFDQTVLDAYLDKTLPQLDNFGDYKTIMVPILHMGHWTLYVINIQLRCIHILDSNPYGPELGGTSWKMFHYSLKDIGTRKLPWARVIMNRLNKSLQQVRPNSRIPKFGNFPIDMPPMCPTMIAGSNDCGFFVMRYIQYYDHTDGSIKQFINRENSGDLRSLALHYLTFHSKNKCLPLPLEIQKFKFGR

SEQ ID NO: 82899 - protein, 61 aa, Zea mays
  Coding DNA Sequence Number=SeqID_41120
MGDHVSGRVRGYVCGQVHSGTRLTDLPYFSVMHKTGACLPKLGQADPLVQALVLDPGLPPE

SEQ ID NO: 82900 - protein, 83 aa, Zea mays
  Coding DNA Sequence Number=SeqID_41121
MAKPFLALLRSIQAPRKIISSVVWHLSNNKLVHTYSYSLHSIDCNLADGEYVLMPEQGVAKEVAPDPAPEPAPALEGKPRFYA

SEQ ID NO: 82901 - protein, 580 aa, Zea mays
  Coding DNA Sequence Number=SeqID_41122
  Gene Ontology: Mol. function=protein binding; Cellular component =nucleus; Biological process=mRNA processing
  Homolog annotation: Hit_ID=Q2HU72; Match level="QueryCoverage=41%, HitCoverage=51%, E-value=4e-54, Identity=41%"; Hit description =Steroid nuclear receptor, ligand-binding
MATFDAVGEGKEKPFVHCFVDGTWSTITGSCTVVRDVKDLLFHSYFSLMDDLRLQKPPDGEPYEIRLLDIPGALIAAAFEFLLDGIMFTLTAFYKCPVTLFKGWKRLIQDMIGREGPFLETAGVPFAGLAILLWPFAIVGAVLASVLSSVPLGAYAAVVAYQESSLILGIAYVFSSVSIFDEYTNNVLDMAPGSCFPRNQGEDLVNRGVITMKDIEEMKSSKVGSSVLNVGLPAYVILNALWKKRLGSVQPTPTRLGTPDSVRCARLVRVKRPLSGLDGGVRLLSGTIIRGTPKTPNLSWGHDLAPSPASGKDSRSRRIHVSPEGPLKQRAHLRLARGPARAGFAEKQPWPDRLASQPDRRSIQCKDRLTPYPDTRSSVDRSHFAPPLADLTGKQRRLRYSDCCATRQGAIGSSTSPDPGARTQPRHRRTDSASPDPRARTQPRLQKTKTVSASLDPRARTQPQLRKTVYATPDPRARTQPRLRKTVSASPDPRARTQPRLRKTVSASPDPRARTQPRLRKTVSASPDPRARTQPRLRKTVSASPDPRARTQPRPRRSHRLARPWARTDHVTGGPSLPYP

SEQ ID NO: 82902 - protein, 74 aa, Zea mays
  Coding DNA Sequence Number=SeqID_41123
  Gene Ontology: Mol. function=steroid hormone receptor activity; Cellular component=nucleus; Biological process=regulation of transcription, DNA-dependent
  Homolog annotation: Hit_ID=Q1SFD4; Match level="QueryCoverage=70%, HitCoverage=9%, E-value=6e-14, Identity=64%"; Hit description =Steroid nuclear receptor, ligand-binding
MATFDAVGEGKEKTFVHCFVDGTWSTITGSCTVVRDVKDLLFHSYFSLMDDLRLQKPPDGELLGAFGFRRSSKK

SEQ ID NO: 82903 - protein, 168 aa, Zea mays
  Coding DNA Sequence Number=SeqID_41124
MGKGTKRKREPTPPSDDFGDSEYSEEEFSSESEGSPAPVSPPASSDDSDDSQGIAAEVWTYIRAVERSGLEGSDESEFSSDEEDSNGGEDEDDDDDDGNGDDGGDGDGDGSNGGGATTTRAVPEAAAVRAAPEAAAAKAAPRAAAAVAAARPVAKRHWSLDISIVRIM

SEQ ID NO: 82904 - protein, 154 aa, Zea mays
  Coding DNA Sequence Number=SeqID_41125
MGKGTKRKREPTPPSDDFGDSEYSEEEFSSESSGSPAPVSPPASSDDSDDSQGIAAEVWTYIRAVERSGLEGSDESEFSSDEEDSDGGEDEDDDDDDGNGDDGGDGDGDGSNGGGGDGDKGSTRGGSSTGSTRGGGSKGGTKGGGGGSSSKASG

SEQ ID NO: 82905 - protein, 67 aa, Zea mays
  Coding DNA Sequence Number=SeqID_41126
MALFEWSSVDLIGELVALALESGERRRDRRRGHCFRRRRDHEQATVDSEVQQVEIAEQELIEGKLCP

SEQ ID NO: 82906 - protein, 90 aa, Zea mays
  Coding DNA Sequence Number=SeqID_41127
MALFEWSSVDLIGELVALALESGERRRDRRHGHCFRRRRDHEQATVDSEVQQLEIAEQELIEDHYVNWNMERPPGKTVLPQGYNGTPLAD

SEQ ID NO: 82907 - protein, 92 aa, Zea mays
  Coding DNA Sequence Number=SeqID_41128
MEPVCEYWTTMIVSSAQNCSPDWRLAAGPPKLEDKPSALAIPDEQATVDSEVQQVEVAEQELIEDHYVNGNMERPPGKTVLPEGFNGTPLAD

SEQ ID NO: 82908 - protein, 53 aa, Zea mays
  Coding DNA Sequence Number=SeqID_41129
MALPRQGHAPPSRVKTNKPLWNLRFNHYVNGNMERPPGKTVLPQGYNGTPLAD

SEQ ID NO: 82909 - protein, 288 aa, Zea mays
  Coding DNA Sequence Number=SeqID_41130
MLLTRQSSWHNNVPANSGKERTAYNRSTASIDMETGSLQLLAPLLLTGGKGADLVIRGNVVLNTLSARSTSTLLWDQICINSSSSWQVFWPSQTVLRGRLRFRSLMKKCGMKSLVDDLLLLTQALSHSAQQATSPCALVLATAASANGFHVAPEFVPVMEAHLVMVAPVSEACQRGCDGVHASVEGGDLGASVARQKCFGPSELFYWTGSSSIWDLAMQVDKNETVFHGLICMFVQCAMCGHARSKPTDGRWRGPFPPLYFFSVRMGPTILHVRMHAWTSGRDALFPT

SEQ ID NO: 82910 - protein, 95 aa, Zea mays
  Coding DNA Sequence Number=SeqID_41131
MPNPIFSVSCVSSDVLMGRETGLLQLLAPLLLTGGKGADLVIRGNVVLNSGNRAGEDGPKQAHGWRSRRGGSEEKGPGAECQRQSCFGEWEDRRI

SEQ ID NO: 82911 - protein, 78 aa, Zea mays
  Coding DNA Sequence Number=SeqID_41132
MARRLDDMKGKCALGPFLSILVIECQHKCLNVNQCPWMNKVQIFNKGREAPSCGDSSQTGLRKEKQEHRGIQVDHWIT

SEQ ID NO: 82912 - protein, 160 aa, Zea mays
  Coding DNA Sequence Number=SeqID_41133
MEKSFERKPAKEKKSKLAQQKRKGKDDNVPVSFVNHVCKPHGHVNSALLRRTFLKGLSFILLSIQNTFVLFCAKKPKLILWRSNNMRAKVKGKCALGPFLSILVIECQHKCLNVNQCPWMNKVQIFNKGREAPSCGDSSQTGLRKEKQEHRGIQVDHWIT

SEQ ID NO: 82913 - protein, 432 aa, Zea mays
  Coding DNA Sequence Number=SeqID_41134
  Gene Ontology: Mol. function=helicase activity; Cellular component =chloroplast thylakoid membrane; Biological process=RNA-dependent DNA replication
  Homolog annotation: Hit_ID=Q7G2B3; Match level="QueryCoverage=95%, HitCoverage=94%, E-value=1e-168, Identity=64%"; Hit description =Pentatricopeptide, putative
  Pfam annotation: Domain name=PPR; Domain location=166-200; Score =27.3; E_value=5.3e-05; Accession=PF01535.11; Description=PPR repeat
  Pfam annotation: Domain name=PPR; Domain location=236-270; Score=7.5; E_value=0.98; Accession=PF01535.11; Description=PPR repeat
  Pfam annotation: Domain name=PPR; Domain location=271-305; Score =21.8; E_value=0.0024; Accession=PF01535.11; Description=PPR repeat
  Pfam annotation: Domain name=PPR; Domain location=306-340; Score =29.2; E_value=1.4e-05; Accession=PF01535.11; Description=PPR repeat
  Pfam annotation: Domain name=PPR; Domain location=353-387; Score=0.1; E_value=7.4; Accession=PF01535.11; Description=PPR repeat
  Pfam annotation: Domain name=PPR; Domain location=388-422; Score=5.8; E_value=1.6; Accession=PF01535.11; Description=PPR repeat
  Pfam module annotation: Pfam domain module=PPR::PPR::PPR::PPR::PPR::PP R; Domain location=166-200::236-270::271-305::306-340::353-387::388 -422
MTNEMAATKARSIIIVRRNGGESPPDTAQRNGDGVREGAEEVAGLNAGRFPREVVLQLPPPRGQPENDDDDGETFSPGQDSRRRFFGDVRLEADRIFRILLQDGPGFSTRHALDEMRPKVSIELVREVLFRIVVSVDSVNRERYPKLAYKFFIWAGQQEGYQHSTSMYNLVMKVFAECGEVKAMWRLFEEMAAKGLPVSSRTFHLLICASVKVGLRRRLVERFIRSSTFNYRPFRNAFNAILYTLLTIEQYSLIEWVHEKMILEGYSPDVLTYNVVLRAKYMLGKLDQFHQLLDEMGKNGLTPDLHTYNLLLHVLGKGDKPLAALNLLNYMSDVGCRPNVLHFTNLIDGLGRAGNPRSLQGLCAVGEFDKAFTMLKDMDSHGCTPNFSVYSSLVRRLRNAGKDTQANNVIKYMTDKGHYLHLLSRFGGFRRC

SEQ ID NO: 82914 - protein, 83 aa, Zea mays
  Coding DNA Sequence Number=SeqID_41135
MPGSSLAASPAREVDADGSKDARAAPLRAPPMAISGDCKEKAAGDEDSAEKPQILLARYLTFLLLVLFSEVIFADYNNDGGRM

SEQ ID NO: 82915 - protein, 83 aa, Zea mays
  Coding DNA Sequence Number=SeqID_41136
MPGSSLAASPAREVDADGSKDARAAPLRAPPMATSGDCKEKAAGDENSAEKPQILLARYLTFLLLVLFSEVIFADYNNDGGRM

SEQ ID NO: 82916 - protein, 123 aa, Zea mays
  Coding DNA Sequence Number=SeqID_41137
  Subcellular localization annotation: CTP_CleavageSite=72; ConfidenceScore=5.57e-01
MRWLLPLLSLMGLQSTVGALWFARQNMSSPRHAASTYPDASSSTVGSSSSPPVRRAASPAREVDADGSKDARAAPLRAPPMATAGDCKEKAAGDEDSTEKLAVVLPARNWKAPGHRLAHTHPI

SEQ ID NO: 82917 - protein, 148 aa, Zea mays
  Coding DNA Sequence Number=SeqID_41138
  Subcellular localization annotation: CTP_CleavageSite=81; ConfidenceScore=5.49e-01
MRWLLPLLSLMGLQSTVGALWFARQNMSSPRHAASTYPDASSSTVGSSSSPPLQEREQRAGQVRHPCRLPARPPMPGSSLAASPAREVDADGSKDARAAPLRAPPMATAGDCKEKAAGDEDSAEKLAVVLPARNWKAPGHRLAHTHPI

SEQ ID NO: 82918 - protein, 523 aa, Zea mays
  Coding DNA Sequence Number=SeqID_41139
  Gene Ontology: Mol. function=oxidoreductase activity, acting on the CH-NH2 group of donors, NAD or NADP as acceptor; Cellular component =membrane; Biological process=nitrogen compound metabolic process
  Homolog annotation: Hit_ID=Q9ZNX7; Match level="QueryCoverage=52%, HitCoverage=14%, E-value=6e-87, Identity=59%"; Hit description=NADH dependent Glutamate Synthase precursor
  Pfam annotation: Domain name=GATase_2; Domain location=312-520; Score= 72.1; E_value=1.7e-18; Accession=PF00310.11; Description=Glutamine amidotransferases class-II
MSGSLVLGGTGGGEGMQYVPLVKSAAGDKLSYDMYYYLALRGMTVGGKAVQLLAWEFATNAAGSGGAIMDSGTTFTYLDPTVFQPVADTVVTVVGGRYKRSKNTEVGLGLHPYFALPQGASQPTDKPFRTEHMRRLEFAFWFKEKLFGKTGQARTVRALAADRPRHKDDPQTEPMQKHKFPLQTVRRKSKDRPSPRADRPASGADRPVGSEACCSAMLTAQGKASRSAPLGAGRWARRGRPVAAPYRSGWQAYGGVSLEGSEFLGGMHRTEERVVPRAPHAAARDAEVVRPLSKLPNSSIGLYDSSFERDACGVGFVAELSGDYKRETVNDAIEMLERMAHRGACSCEKNTGDGAGIMVALPHDFFKEVAKDAGFELPPPGEYDVGMFFMPTDEKRREKGKAEFKKVAESLGHTISYFWARSISYFWGSIQLMGEVLTEPVIEQVFVTKSSRSEAEFEQQTVVYKGQLKPSQLKGYYYADLGHENFMSYMALSPAVVLLWPTAMPDSSGCDLRLGGGKEMCLV

SEQ ID NO: 82919 - protein, 307 aa, Zea mays
  Coding DNA Sequence Number=SeqID_41140
  Gene Ontology: Mol. function=oxidoreductase activity, acting on the CH-NH2 group of donors, NAD or NADP as acceptor; Cellular component =membrane; Biological process=nitrogen compound metabolic process
  Homolog annotation: Hit_ID=Q9ZNX7; Match level="QueryCoverage=89%, HitCoverage=14%, E-value=3e-87, Identity=59%"; Hit description=NADH dependent Glutamate Synthase precursor
  Pfam annotation: Domain name=GATase_2; Domain location=96-304; Score =72.1; E_value=1.7e-18; Accession=PF00310.11; Description=Glutamine amidotransferases class-II
MLTAQGKASRSAPLGAGRWARRGRPVAAPYRSGWQAYGGVSLEGSEFLGGMHRTEERVVPRAPHAAARDAEVVRPLSKLPNSSIGLYDSSFERDACGVGFVAELSGDYKRETVNDAIEMLERMAHRGACSCEKNTGDGAGIMVALPHDFFKEVAKDAGFELPPPGEYDVGMFFMPTDEKRREKGKAEFKKVAESLGHTISYFWARSISYFWGSIQLMGEVLTEPVIEQVFVTKSSRSEAEFEQQTVVYKGQLKPSQLKGYYYADLGHENFMSYMALSPAVVLLWPTAMPDSSGCDLRLGGGKEMCLV

SEQ ID NO: 82920 - protein, 137 aa, Zea mays
  Coding DNA Sequence Number=SeqID_41141
  Gene Ontology: Cellular component=integral to membrane
  Homolog annotation: Hit_ID=O24564; Match level="QueryCoverage=89%, HitCoverage=55%, E-value=6e-61, Identity=58%"; Hit description =Embryogenesis transmembrane protein
MSPGPLLHIWVLVLSVFTYIMIHILVFMRVVPRFVFEKKFVPKRLKDVARSVERWILSRCGVHRSQKNSSHEKDLEEARKFTLVLVTFAATVAYQARLSPPGSFWAENDENKTPATSMLRSGNLPRYNSNNRRGPSK

SEQ ID NO: 82921 - protein, 618 aa, Zea mays
  Coding DNA Sequence Number=SeqID_41142
  Gene Ontology: Cellular component=integral to membrane
  Homolog annotation: Hit_ID=O24564; Match level="QueryCoverage=66%, HitCoverage=80%, E-value=1e-158, Identity=46%"; Hit description =Embryogenesis transmembrane protein
MPTLIILLLSKNVARQRLWLRSMQLTMVLDLFSLMGAYAAYDAGTCRAVKSSIYIWVLVLSVFTYIMIHILVFMRVVPRFVSEKKICSKTAERCGAVYGALDPIQVWCSQEPKEQLSQERSRGSSQVHSGLSPPGSFWAENDENKTPATSMLRSGNLPRYNTFVVCNSTSFIASLVTIILLLSPELSRHGIKSRAVTVCVVVNILGLVGAYAAGSCRSVVTFVSAVLVAVLVWIFFAVLAGIFVNRSVAEWFGKKIKPYIMRCTDRFGRVFSSNHGRKRSRNPEGENSIASHQQTEESIKDIEEGECPGEQQSPGKQQPTNIMVVSISEHASVNEKQAENSSSVMCKLGSQSTDPNSAANEAMTETETENIQDANMEEQQSSLVDGLKTPTTVADQESTAVECLSDIAPNNNCNLWERGDGNHKPFVRDLAGDKRKEQWLREDTTCMLPITNRSYTPRMKKQIDLGLGRTRSQACEVIEKEEEGESVACAHVCVASSARWGRHPGERIKVSPARRHLGREKDSRGRGVSPWGKGTCHLGRKNVELRSSLGTLQQWPWDAICGDRQLWSRLMGTGVVDGGVRPVGGKGTPLPWRARIESWCVDPGHLIRLPWRARRERR

SEQ ID NO: 82922 - protein, 95 aa, Zea mays
  Coding DNA Sequence Number=SeqID_41143
MATRSEVIGPCADGGLPLSFVPFPKGTGETVGLSRSTTTTAMDMCAWLSEWLGIFDSTIDSRELRRRGRQSTSSSSQSSRSRSSDPEIELAVLRQ

SEQ ID NO: 82923 - protein, 382 aa, Zea mays
  Coding DNA Sequence Number=SeqID_41144
  Gene Ontology: Mol. function=transferase activity, transferring glycosyl groups; Cellular component=integral to membrane; Biological process=metabolic process
  Homolog annotation: Hit_ID=Q9FU69; Match level="QueryCoverage=63%, HitCoverage=55%, E-value=2e-36, Identity=33%"; Hit description =Putative UDP-glucose: flavonoid 7-O-glucosyltransferase
MNLHKIFEGVDDDDTRPVHVPAFPIDVEILRARSPGNFTGPGMKEFGQEIMAESARADVLVVNSFAEMEPMFVDAYEAALGKKVWTIGPLFLAPTMPLAATAEDANAVRCVSWLESMKPRTVVFVSFGSRVRSSLPQLVEIEHGLEATKRPFIWVVKPRNLAEFERWLYEDGFESCIGEAGLCVTAGLPMVSCPHFAEQFMNEKLVVDVLRVGVPVGVKGAAQWGVEAEGVLATRQDVERAVAAVMDCGEEGSARRARAAELGRKAREAVGIVTEAELEATALASAVQSLEATSHILASGCPLVVSVAKNYIQAIVEKIRYTSCVLQNKLVVSGTPIVPSKLIDDTLPVEATLQALSLGRMIVNGTTVKTRMWTVVHDVSAP

SEQ ID NO: 82924 - protein, 94 aa, Zea mays
  Coding DNA Sequence Number=SeqID_41145
MAAHSGVAHGDRATVSEDDVTKFGAALGDGHAGVQDVVTKLASNAAHGDGDAGCQDDVTKVACDTTHGDGDVDCYDGVTKVACGATHGDGDTGC

SEQ ID NO: 82925 - protein, 556 aa, Zea mays
  Coding DNA Sequence Number=SeqID_41146
  Gene Ontology: Cellular component=intracellular; Biological process =intracellular protein transport
  Homolog annotation: Hit_ID=Q5N7Y5; Match level="QueryCoverage=86%, HitCoverage=70%, E-value=1e-160, Identity=61%"; Hit description =Target of myb1-like
  Pfam annotation: Domain name=GAT; Domain location=58-137; Score=36.5; E_value=9.1e-08; Accession=PF03127.5; Description=GAT domain
MLLMLHCCLDLQQPLLNLLECGLHLCEINPYVGPQVPHRWSWDAGCQDGVMKVACGAAHGDGDIGCQNDVTKGLRQEVIVELVDQCRTYKQRVVQLVNSTTDEELMSQGLTLNDDLQRVLAKHDAIAAGIAVRVEKKSKSLQALVETKDSTNQDSKKEQGLIDIEDPTSQDAAKDPNQSTSDQSPFEQLALPAPPVSNGAATSAPQSDLGIDLLSWDDTPATTQNPLALVPVTDPLADSTSSNQNALAIVDTFSENSTTNHNAQPADPFGLNPSSAIPGSQLYNTPTQQPFQSQQPPQQAALYANGGAVDPGTSYDQASQFKNVSSGWNGQAANPVVPLPEQALNYDDQSGNLPPPPWEAQPASNNELPNGQLGSLQPLPGSAGQIGGMQQPLQPQVNHMGVPQSQPMYSNQPMQPGQVAATTQMQPGFGNQQFGSLPPTSMLGMQFGGMQPPQMYGGSQPVMMYPHKWQCPSMEQCAQQRRMVVDWRGMYGYPGANGLSQSMYGLSVQDNSSMGMRSSYQTTTAPPSTGQPMKPTKPEDKLFGDLLSIAKTKKAS

SEQ ID NO: 82926 - protein, 464 aa, Zea mays
  Coding DNA Sequence Number=SeqID_41147
  Gene Ontology: Mol. function=[ribulose-bisphosphate carboxylase] -lysine N-methyltransferase activity; Cellular component=chloroplast; Biological process=translation
  Homolog annotation: Hit_ID=Q6Z5K4; Match level="QueryCoverage=80%, HitCoverage=74%, E-value=0.0, Identity=90%"; Hit description =Putative ribulose-1,5-bisphosphate carboxylase/oxygenase small subunit N-methyltransferase
  Pfam annotation: Domain name=Rubis-subs-bind; Domain location=335 -459; Score=69.5; E_value=1.1e-17; Accession=PF09273.1; Description =Rubisco LSMT substrate-binding
  Pfam annotation: Domain name=SET; Domain location=82-310; Score =151.5; E_value=2.2e-42; Accession=PF00856.18; Description=SET domain
  Pfam module annotation: Pfam domain module=Rubis-subs-bind::SET; Domain location=335-459::82-310
  Subcellular localization annotation: CTP_CleavageSite=43; ConfidenceScore=5.77e-01
MATSSTTALHSQFRPPLRAPRHLRPLPHSYSSSSRTRGCAPVRASAASASAPAQREIAAGVPWGCEIESLESAASLERWLIDSGLPEQRLAIQRVDIGERGLVALKNIRKGEKLLFVPPSLVITADSEWGRPEVGDVMKRNSVPDWPLIATYLISEASLEGSSRWISYIAALPRQPYSLLYWTRAELDAYLVASPIRKRAIQRITDVIGTYNDLRDRIFSRHPDLFPEEVYNIETFLWSFGILFSRLVRLPSMDGRVALVPWADMLNHSPEVETFLDFDKSSRGIVFTTDRSYQPGEQVFISYGKKSSGELLLSYGFVPKEGTNPNDSVELLVSLDKSDNCYKEKLQALKRNGLSESESFPLRVTGWPVELMAYAFLVVSPPDMSQCFEEMAAAASNKTSSKPGLNYPDLEEQALQFILDCCESNIEKYTKCFDLAAKASDTCMPNQTAVQALGRKFHLDARNK

SEQ ID NO: 82927 - protein, 154 aa, Zea mays
  Coding DNA Sequence Number=SeqID_41148
  Homolog annotation: Hit_ID=Q8S3U9; Match level="QueryCoverage=44%, HitCoverage=6%, E-value=7e-25, Identity=81%"; Hit description =Exocyst complex component 2
TLKISGVANRAFEPLFERQAQAEKIRSVQGMLQRFRTLFNLPSAIRGNIRKGEYDLAVREYQKAKSIVFPSHLLTRKLSIPAGVLSPYSKLKRSTDQLRRNADALEILRKTRFPHVHGAGEKKSPETILDHETMRGLWQQMFGLGFSGWFYDTL

SEQ ID NO: 82928 - protein, 389 aa, Zea mays
  Coding DNA Sequence Number=SeqID_41149
  Homolog annotation: Hit_ID=Q8S3U9; Match level="QueryCoverage=41%, HitCoverage=16%, E-value=3e-50, Identity=58%"; Hit description =Exocyst complex component 2
MTLQNLKVSCAGRGLMGYLGNKLYCSSLSRRSHCRISNVWSFLHNFVMIIWKNVMKITEQLSKTASNCYISFHSICVVVLTKVDLITIYRSESFPLWVTGWSVELMAYAFLVVSPPDMSQCFEEMAAAASNKTSSWRWRMSSSGPAIVMPCWSSMPQMTVSSPISREKSQDLDPNMRDEVIYSSPNFDPKVFLSWVHKDTSAADLEAGALTLKTDPKGRTQQKKLLVKENFDCFVSCKTTIDVTLKISGVANRAFEPLFERQAQAEKIRSVQGMLQRFRTLFNLPSAIRGNIRKGEYDLAVREYQKAKSIVFPSHLLTRKLSIPAGVLSPYRLLILICMACNCCTARYGWRSGSNCWYDQDPSTLIIDDEATPNSRRGRTMAPSCGISG

SEQ ID NO: 82929 - protein, 229 aa, Zea mays
  Coding DNA Sequence Number=SeqID_41150
  Gene Ontology: Mol. function=GTP binding; Cellular component=signal recognition particle, endoplasmic reticulum targeting; Biological process=protein transport
  Homolog annotation: Hit_ID=Q8S3U9; Match level="QueryCoverage=65%, HitCoverage=16%, E-value=2e-50, Identity=60%"; Hit description =Exocyst complex component 2
SSPISREKSQDLDPNMRDEVIYSSPNFDPKVFLSWVHKDTSAADLEAGALTLKTDPKGRTQQKKLLVKENFDCFVSCKTTIDVTLKISGVANRAFEPLFERQAQAEKIRSVQGMLQRFRTLFNLPSAIRGNIRKGEYDLAVREYQKAKSIVFPSHLLTRKLSIPAGVLSPYRLLILICMACNCCTARYGWRSGSNCWYDQDPSTLIIDDEATPNSRRGRTMAPSCGISG

SEQ ID NO: 82930 - protein, 210 aa, Zea mays
  Coding DNA Sequence Number=SeqID_41151
  Gene Ontology: Mol. function=two-component response regulator activity; Biological process=two-component signal transduction system (phosphorelay)
  Homolog annotation: Hit_ID=Q9ZQW0; Match level="QueryCoverage=51%, HitCoverage=69%, E-value=9e-42, Identity=87%"; Hit description =Response regulator 1
  Pfam annotation: Domain name=Response_reg; Domain location=112-209; Score=7.6; E_value=0.0009; Accession=PF00072.14; Description =Response regulator receiver domain
MKEFRAPEYGICSPCLAVGTRELAVATMRPTAALHQERATTLRGRRASGDGVVEADGRRQHTLGPTTTAVVPSVSAMATAAAAPASVAPSLAPKANVSRKAVVPVDASELEKHVLAVDDKSVDRAAIARILRGSRYRVTAVESATRALELLAMGLLPDVSMIITDYWMPGMTWYELLKRVKESAALRGIYVVIMSSMTIVIYTFSNKILR

SEQ ID NO: 82931 - protein, 134 aa, Zea mays
  Coding DNA Sequence Number=SeqID_41152
  Gene Ontology: Mol. function=two-component response regulator activity; Cellular component=voltage-gated potassium channel complex; Biological process=two-component signal transduction system (phosphorelay)
  Homolog annotation: Hit_ID=Q9ZQW0; Match level="QueryCoverage=75%, HitCoverage=64%, E-value=1e-41, Identity=89%"; Hit description =Response regulator 1
  Pfam annotation: Domain name=Response_reg; Domain location=36-133; Score=7.6; E_value=0.0009; Accession=PF00072.14; Description =Response regulator receiver domain
  Subcellular localization annotation: CTP_CleavageSite=30; ConfidenceScore=5.03e-01
MATAAAAPASVAPSLAPKANVSRKAVVPVDASELEKHVLAVDDKSVDRAAIARILRGSRYRVTAVESATRALELLAMGLLPDVSMIITDYWMPGMTWYELLKRVKESAALRGIYVVIMSSMTIVIYTFSNKILR

SEQ ID NO: 82932 - protein, 125 aa, Zea mays
  Coding DNA Sequence Number=SeqID_41153
  Homolog annotation: Hit_ID=Q32SG6; Match level="QueryCoverage=24%, HitCoverage=3%, E-value=1e-07, Identity=87%"; Hit description=HIRA
  Subcellular localization annotation: CTP_CleavageSite=29; ConfidenceScore=5.17e-01
MPSPTSLAATGGKTTGRFTLRPTRRRTKTCDEVVAPCGLVQHGGPRVIRPIVTGPAWPLRITGLICKGLPVITVCNPALWEYFGDNLASNFASTFSFPKDGELGKLQIDISKFMARKPGLQMIGC

SEQ ID NO: 82933 - protein, 203 aa, Zea mays
  Coding DNA Sequence Number=SeqID_41154
  Homolog annotation: Hit_ID=Q10ET5; Match level="QueryCoverage=45%, HitCoverage=87%, E-value=1e-16, Identity=66%"; Hit description =Expressed protein
MLDEAAGCDDLVAGLRPATRGTKGKSASRLASGSSQRGYALDCGCAAVGDGGMAPRAGAASPGHRVVGEGREPGAGAVGHGAQDAVRRIRSRTHRHVKDSEKRVLARKALMQHVRYQELGKKLREILIRNISDRQVLDEMSREVLSTTLSGIECVCGLSCAEEEVSVLSAVSTRCRYLDWKEPFGRFFMACGDPTYQVIIARI

SEQ ID NO: 82934 - protein, 125 aa, Zea mays
  Coding DNA Sequence Number=SeqID_41155
  Gene Ontology: Mol. function=protein binding; Cellular component =ribonucleoprotein complex; Biological process=mRNA metabolic process
  Homolog annotation: Hit_ID=Q9SY09; Match level="QueryCoverage=68%, HitCoverage=74%, E-value=2e-40, Identity=94%"; Hit description=Small nuclear riboprotein Sm-D1
  Pfam annotation: Domain name=LSM; Domain location=5-70; Score=73.5; E_ value=6.8e-19; Accession=PF01423.12; Description=LSM domain
MKLVRFLMKLNNETVTIELKNGTVVHGTITGVDISMNTHLKTVKLTLKGKNPVTLDHLSVRGNNIRYYILPDSLNLETLLVEETPRESLWGVVAAEVVDVVGAGGHAELYRSPAVGSLARQVSST

SEQ ID NO: 82935 - protein, 88 aa, Zea mays
  Coding DNA Sequence Number=SeqID_41156
MGRRRRGHLVSLQPSAGEQSESAAVSARMSPGGGLLFSMGLLGYIFSKSTISLVLGITPGLATLLLGTQSEVLEERQIQLPAYLGSGR

SEQ ID NO: 82936 - protein, 141 aa, Zea mays
  Coding DNA Sequence Number=SeqID_41157
  Gene Ontology: Cellular component=membrane
MAGEHREDKEGECFVRFGHGGGLTPSGITVKGNVCVSVFGNEKQYHGSRKLSGGCGLLFSMGLLGYIFSRSTISLVLGIAPGLATLLLGTLNLKFWRSGGSSFLLILAQAAISAFLAWKYSHAYFLVTLLTCKEYIVQSLS

SEQ ID NO: 82937 - protein, 363 aa, Zea mays
  Coding DNA Sequence Number=SeqID_41158
  Homolog annotation: Hit_ID=Q2PWT6; Match level="QueryCoverage=8%, HitCoverage=25%, E-value=9e-08, Identity=96%"; Hit description =Putative small nuclear ribonucleoprotein D1
  Pfam annotation: Domain name=TMEM14; Domain location=99-202; Score= -8.8; E_value=0.0047; Accession=PF03647.4; Description=Transmembrane proteins 14C
  Subcellular localization annotation: CTP_CleavageSite=60; ConfidenceScore=5.80e-01
MAAAAQLHGSAAATVAYRGTRAYSVPSSCRWPQSGSPKLSISTSGVSMKPFGFAAKLSTKCANENARVEELDLRSDQMKELQVEEQVIPQKRSAKIHDFCLGIPFGGLLFSMGLLGYIFSRSTISLVLGIAPGLATLLLGTLSLKFWRSGRSSFLLILAQAAISAFLAWKYSHAYFLTNRLLPWGFYASLSTTGPTKAQLSRSNRFGASHPSDRPAFKLGFTPPAPRKQTSVSSAGGLALSPPPHLLYARTAKMKLVRFLMKLNNETVTIELKNGTVVHGTITVRSGLNPQGPVFASMPTPLPSSALAPTPSPALLFAAAHCLGACPRCSGTKRTMENPSSTGERRWKVADIVGATMTAGSYG

SEQ ID NO: 82938 - protein, 215 aa, Zea mays
  Coding DNA Sequence Number=SeqID_41159
  Homolog annotation: Hit_ID=Q8H6I2; Match level="QueryCoverage=99%, HitCoverage=97%, E-value=3e-89, Identity=74%"; Hit description =Putative MURBZC
  Pfam annotation: Domain name=Zea_mays_MuDR; Domain location=35-215; Score=-41.9; E_value=0.013; Accession=PF05928.2; Description=Zea mays MURB-like protein (MuDR)
MEPAAELCSQKLSAAVDAARDTMKASATACMVAGDYCATFSLGNDVVSTLDVLESAVAAEKSAMSSYNQASAAVDCAKETVAKYCERAMGVSASLLVNQKLAQALRYAMSLMSDTAKKLQDTASLCYTDEDVVDGFKLTQVAGSLDELAETLEVTAIDCQVSMMDPTTILEAGYGSEDSAVWEDVFRDREIMNQPLEAEALAERYAKWGLNYNEI

SEQ ID NO: 82939 - protein, 76 aa, Zea mays
  Coding DNA Sequence Number=SeqID_41160
  Homolog annotation: Hit_ID=Q8H6I2; Match level="QueryCoverage=55%, HitCoverage=17%, E-value=1e-09, Identity=72%"; Hit description =Putative MURBZC
MEPAAELCAQKLSASVDAARDTMKASATACMVAGDYCATFSLGLFYFFSRSRTDFLELSFPSSIGTLFLVRASIES

SEQ ID NO: 82940 - protein, 136 aa, Zea mays
  Coding DNA Sequence Number=SeqID_41161
MMNEMQAQMRQERQEMRQEQLEMRQEMRNYHIPAGLMKIKRKEFLSLKQGDGNGYPKPEYPMGFTRYEDGYMMISLPAGADGPRHRARWSATWREAAVLSGQARTVCGQGPDGAAEDRRRRLDLAPGRDPVGEERF

SEQ ID NO: 82941 - protein, 116 aa, Zea mays
  Coding DNA Sequence Number=SeqID_41162
MDSPPLVENGRESSLGLGLRDRIGPLTIRDGNGYPKPEYPTGFTRYEGGYGMISLTAVIGILEFKTFLAGTGYPMGKITHVGTGMGKIFESAFIPFVSFGDLDNNTFKGLLGFAKC

SEQ ID NO: 82942 - protein, 198 aa, Zea mays
  Coding DNA Sequence Number=SeqID_41163
MGERAELLRSRDPSARGVSSGLSYGAGRALLGGSAGGVRLWDFSGRHGCQRPRAESSPGETQQGRCAEKGERICGHGQGGSQGNGSCCSTPWTWSSAALGGAPARSREEDRNRELAPRGQGGRSAASHPSKASNSREQGGRRPPWLGAGRELGVGASRHGREGTGAWTPWIQGGSSLRAAVWKKGTGKKKMAARGVDE

SEQ ID NO: 82943 - protein, 198 aa, Zea mays
  Coding DNA Sequence Number=SeqID_41164
MAGRCGVEQIPARSRPWSRGLDNHGREGRAAAFQGSKRQGVSSGLSYGAGRALLGGSAGGVRLWDFSGRHGCQRPRAESSPGETQQGRCAEKGERICGHGQGGSQGNGSCCSTPWTWSSAALGGAPARSREEDRNRELAGRSGDRKGSSAGVQLGAGRSRGKRRGRRLAARHGGEHDSLLLRVEEKARERRRRGGEEG

SEQ ID NO: 82944 - protein, 221 aa, Zea mays
  Coding DNA Sequence Number=SeqID_41165
MAGRCGVEQIPARSRPWSRGLDNHGREGRAAAFQGSKRQGVSSGLSYGAGRALLGGSAGGVRLWDFSGRHGCQRPRAESSPGETQQGRCAEKGERICGHGQGGSQGNGSCCSTPWTWSSAALGGAPARSREEDRNRELAPRGQGGRSAASHPSKASNSREQGGRRPPWLGAGRELGVGASRHGREGTGAWTPWIQGGSSLRAAVWKKGAGKKKMTARGVDE

SEQ ID NO: 82945 - protein, 198 aa, Zea mays; identical to SEQ ID NO: 82943
  Coding DNA Sequence Number=SeqID_41166

SEQ ID NO: 82946 - protein, 230 aa, Zea mays
  Coding DNA Sequence Number=SeqID_41167
MQPGCSPPPVAIQKDDHQPRGGEKQAGLWLPPHPQLQGCSSSLLGRGASQVRALPSAWAGDPLLPLAFGGEGCLPALRRTRTSATRGQLAAGRQLQSVWPFGLDGFGTASDAASYRSGRGMAVCPPHGRRSRRAQVRHIHPFSYPSATLGGSYKTSYAAVVATAFLDGLVLTPIGQTRARTPFLRAEAAAADWYRGGHYRWVVECAGTWYGTRLSGYKAPDYPRRQASLL

SEQ ID NO: 82947 - protein, 137 aa, Zea mays
  Coding DNA Sequence Number=SeqID_41168
MAGPTGVSLTLFKAKAVYRSRPRQGCLPKAVDNPFIYAGAQPRHIEPVPQARGQKYLTKTGKSLGAGSKEQMPVPWGDPEPVWPVSLVPYSKSCTLHHFMTGALVFGTISLVRPIAWGPELEKRCLSPGVVRSRVAA

SEQ ID NO: 82948 - protein, 182 aa, Zea mays
  Coding DNA Sequence Number=SeqID_41169
  Homolog annotation: Hit_ID=Q2LC83; Match level="QueryCoverage=31%, HitCoverage=19%, E-value=2e-13, Identity=56%"; Hit description=UDP-D- xylose epimerase 1
MASSRTARGRNDPLYYRNITANTLAVLEAMAAHNFPINPYGKAKKMAEDIILDFSKLKKSDMMAIMILSNRVLNHQVTCASFKKASVIRVQFWYLVSVTRCADDFLYSDFCMLNDIGVTLMTTENGIGFPRVFLTIELPNAKGVKQNLKPKGHFNLSAKGSDDSPYEFDLELFDVVYLIHVE

SEQ ID NO: 82949 - protein, 62 aa, Zea mays
  Coding DNA Sequence Number=SeqID_41170
  Homolog annotation: Hit_ID=Q3I0N3; Match level="QueryCoverage=73%, HitCoverage=25%, E-value=1e-12, Identity=76%"; Hit description=P23
MTTENGIGFPRVFLTIELPNAKGVKQNLKPKGHFNLSAKGSDDSPYEFDLELFDVVYLIHVE

SEQ ID NO: 82950 - protein, 134 aa, Zea mays
  Coding DNA Sequence Number=SeqID_41171
  Homolog annotation: Hit_ID=Q3I0N3; Match level="QueryCoverage=61%, HitCoverage=36%, E-value=9e-13, Identity=75%"; Hit description=P23
MLLAMICHGGGGSCFVVSSSLGADYAEILDRSVASTNRILLYRGYSLFVNGVFLTIEMPDAKGVKHNLKPKGHFNLSAKGSEDSPYEFDLELFDVVYLIHVECSTLGFDCIGLPICRRAKQMLSQNHMLPDQES

SEQ ID NO: 82951 - protein, 82 aa, Zea mays
  Coding DNA Sequence Number=SeqID_41172
  Homolog annotation: Hit_ID=Q3I0N3; Match level="QueryCoverage=95%, HitCoverage=40%, E-value=1e-19, Identity=62%"; Hit description=P23
MPDAKGVKHNLKPKGHFNLSAKGSEDSPYEFDLELFDVVYLIHVECSTLGEQSRCCPKTICYQIKKAENGWWPRLLKKDMCS

SEQ ID NO: 82952 - protein, 125 aa, Zea mays
  Coding DNA Sequence Number=SeqID_41173
  Homolog annotation: Hit_ID=Q8S628; Match level="QueryCoverage=57%, HitCoverage=7%, E-value=2e-14, Identity=44%"; Hit description =Pleiotropic drug resistance protein 13
  Pfam annotation: Domain name=PDR_assoc; Domain location=42-97; Score =34.7; E_value=1e-07; Accession=PF08370.2; Description=Plant PDR ABC transporter associated
MTVSSQRSWEIVEPRLLGIGEDEDALQHFDSLRHSTRWPADWGRQRRRADEASLPTQDYWYWTRVCALLAYAIFFNALFTLALEFLNQNNSKNYEVKGQTKAEINKGMILPFQPLTMMFHKINLY

SEQ ID NO: 82953 - protein, 210 aa, Zea mays
  Coding DNA Sequence Number=SeqID_41174
  Homolog annotation: Hit_ID=Q8S628; Match level="QueryCoverage=20%, HitCoverage=2%, E-value=2e-08, Identity=61%"; Hit description =Pleiotropic drug resistance protein 13
  Subcellular localization annotation: CTP_CleavageSite=75; ConfidenceScore=5.37e-01
MPVSRLRCPPASLAFASTIALARLRLCPNNIDTSAPRAMHTPRLRCPPPQPTPGRRGRGGTGRRVGWRLSSQPLCVSLAFNDLAVLGQIKTRAPCRSERLAKYNQAKNNSGNYEVKGQAKCEINKGMILPFQPLTMMFHKINYFVDMPKEFIEEVMALVELDQLRYALVGKGEYFRNYLPMISLNVFLRYLFYTQGPFYVILILYHPMQH

SEQ ID NO: 82954 - protein, 143 aa, Zea mays
  Coding DNA Sequence Number=SeqID_41175
MSSRSPYASRLSTFRAPGWGAPAPGRIPSPVVTQDGDHQLLGGEKQAGLRSLPRPQLQGSSSSLLGRRASVGGQADAAVGADVVAAGESFPTVEAISAAYGPTPGSLALISEVAGESPGAWRPAGPPVWRLFIPAGTEPEFRL

SEQ ID NO: 82955 - protein, 227 aa, Zea mays
  Coding DNA Sequence Number=SeqID_41176
MTSHGSSDDGNALTHTDGLAREGFPRILWEVLQGAGYLTPPQYAVQQFEKHRVPRCRVRMTLEPHPLQPGWRSLDSESFGYRAEDTIEAIALHGLATFCGFHPLELATHPIGLFPAEKEDCRCFGSDRTPGVAPQGPRKNDLTIYWALGPFVRSFTLLVDPGDIYLPQAPDLWVDLELMDVLCLAFKSFLSTIFCTLLAIFGFPLTLVDISFLSRGIHCMPCTDVTV

SEQ ID NO: 82956 - protein, 138 aa, Zea mays
  Coding DNA Sequence Number=SeqID_41177
MGSAHVAFVLLLLEEHDLAGVGALQPSLGFKDFHQAARLQSPAERSPRIMTVGLVAGRSKPGYGLCPALSFKDVHHPRCGGGYRTFGPLCDEPKPEAAVSAWTEAESARKEASSTREHVASLAEEVQWRRLELGQVVH

SEQ ID NO: 82957 - protein, 182 aa, Zea mays
  Coding DNA Sequence Number=SeqID_41178
  Homolog annotation: Hit_ID=Q6QP51; Match level="QueryCoverage=79%, HitCoverage=56%, E-value=8e-17, Identity=45%"; Hit description =Putative growth-regulating factor 1
  Subcellular localization annotation: CTP_CleavageSite=15; ConfidenceScore=5.22e-01
MAEGRQPLQGRAPPTAARQRQRRRSPSGGSEGRSDRSHFALSLTDLTGKQRRSPRSDCCATHQGEADNSQVQPQAQQEAPPRPTLGLGLGRRSPPRPTLGLGLNLGIRRWSPPRPTPGLGLNLGLGRWSLPRSTPGLGLNLGLGRNRVLARPRPRPLGKSPPRPTLGSDRPCHGGDTSLPYP

SEQ ID NO: 82958 - protein, 125 aa, Zea mays
  Coding DNA Sequence Number=SeqID_41179
  Pfam annotation: Domain name=DUF1754; Domain location=20-108; Score =11.1; E_value=1.9e-06; Accession=PF08555.1; Description=Eukaryotic family of unknown function (DUF17
MTWNSSSRTTALCECSTMLEYQNIVGGRLQLKGKALDVKDGGVKKKKKYQREESSQTESDKNGDEKNPHSDYDHLTRAERRYMEQKQKIHYSKRRKFRRSRYLRRLPTRPSDIILCPTANRGSRT

SEQ ID NO: 82959 - protein, 150 aa, Zea mays
  Coding DNA Sequence Number=SeqID_41180
  Homolog annotation: Hit_ID=Q01DW1; Match level="QueryCoverage=43%, HitCoverage=54%, E-value=3e-08, Identity=40%"; Hit description=[S] KOG3410 Conserved alpha-helical protein
  Pfam annotation: Domain name=DUF1754; Domain location=41-150; Score =154.1; E_value=3.7e-43; Accession=PF08555.1; Description=Eukaryotic family of unknown function (DUF17
MDTAWNRSSDSDTNTDTAWNRSSDSDTDTLNHVIPFALMLEYQNIVGGRLQLKGKALDVKDGGVKKKKKKYQREESSQTESDKNGDEKNPHSDYDHLTRAERRYMEQKQKIDMKKMAKVANKSYKDRMQDFNQYLANLSEHYDIPKVGPG

SEQ ID NO: 82960 - protein, 162 aa, Zea mays
  Coding DNA Sequence Number=SeqID_41181
  Homolog annotation: Hit_ID=Q01DW1; Match level="QueryCoverage=40%, HitCoverage=54%, E-value=3e-08, Identity=40%"; Hit description=[S] KOG3410 Conserved alpha-helical protein
  Pfam annotation: Domain name=DUF1754; Domain location=56-162; Score =125.5; E_value=1.5e-34; Accession=PF08555.1; Description=Eukaryotic family of unknown function (DUF17
MTWNSSSRTTALCECSTVRRPVADFLEREEEGIPHGRRRREQMGEGRDVGVPVEPNPTAGRLQLKGKALDVKDGGVKKNKKKYQREESSQTKSDKNGDEKNPHSDYDHLTRAERRYMEQKQKIDMKKMAKVANKSYKDRMQDFNQYLANLSEHYDIPKVGPG

SEQ ID NO: 82961 - protein, 67 aa, Zea mays
  Coding DNA Sequence Number=SeqID_41182
MAKVANKSYKDCMQDFNQYLANLSEHYDIPKVELKGKCALGPFLSILVIECKHKGLNVKICSWMNKV

SEQ ID NO: 82962 - protein, 101 aa, Zea mays
  Coding DNA Sequence Number=SeqID_41183
  Subcellular localization annotation: CTP_CleavageSite=51; ConfidenceScore=5.40e-01
MTKVLAAAAVPSGVRAAVILGPTAVSPRGRRPTVALHHDRATVALHRELARLTARSVARLPAGAGIDGSGTTEEAEMAAALMDVATASAAERELGFHLVPK

SEQ ID NO: 82963 - protein, 174 aa, Zea mays
  Coding DNA Sequence Number=SeqID_41184
MKKKREELAVYSQEAVSVWGTGLSGGAPDSVRRPTVALHHDRATVALHRELARFAARSVARLPAGAGLDGSGTAEEAEMAAALMDVATASAAVFSAVASVSAAASSCSNKKAPTAFVAAAFAKKPETPTTADVAQEKHEELERCIDECESGSEVVFRSIVRNRVSLLNIHSPAI

SEQ ID NO: 82964 - protein, 100 aa, Zea mays
  Coding DNA Sequence Number=SeqID_41185
  Subcellular localization annotation: CTP_CleavageSite=32; ConfidenceScore=5.62e-01
FALFTPPSRRLSAAASAAVFSAVASVSAAASSCSNKKAPTAFVAAAFAKKLETPTTADVAQEKHEELERCIDECESGSEVVFRSIVRNRVSLLNIHSPAI

SEQ ID NO: 82965 - protein, 37 aa, Zea mays
  Coding DNA Sequence Number=SeqID_41186
MSAKKGFALIPAVTEPPKNVSPILQTLQNIRDIEMRK

SEQ ID NO: 82966 - protein, 95 aa, Zea mays
  Coding DNA Sequence Number=SeqID_41187
  Subcellular localization annotation: CTP_CleavageSite=38; ConfidenceScore=5.42e-01
MAKLSSSTRDRALASLAQIPNRIVATTATFFMSWGKLMAVYANGSSRFARGLSEKGFALIPAVTEPPKNISPVLQTLQNIGGIEMRKRLHKLTFN

SEQ ID NO: 82967 - protein, 94 aa, Zea mays
  Coding DNA Sequence Number=SeqID_41188
MARVTCTLRGKRLDGGVSVLSVRVNLIWIHFSKHFCKTKSLIIEKPYLDSLNQHILESLFFSRVRKQQTFVAFAPRWFPVKKNKGEAAGGHGPP

SEQ ID NO: 82968 - protein, 98 aa, Zea mays
  Coding DNA Sequence Number=SeqID_41189
MGVEQARVACTLRGKRLDGGVSVLSVRVNLIWIHFSKHFCKTESLIIEKPYLDSLNQHILESLFFSRVGKQQTFVAFAPRWFPVKKNKSEAAGGHDPP

SEQ ID NO: 82969 - protein, 76 aa, Zea mays
  Coding DNA Sequence Number=SeqID_41190
  Subcellular localization annotation: CTP_CleavageSite=42; ConfidenceScore=5.33e-01
MAYDFLAAAPSQGQCPLFPSPGSAAPRNQVFPAAHHIDAPLSSMSRFARSTKCEALWIAHVTSLDSSRLFTWYFVD

SEQ ID NO: 82970 - protein, 128 aa, Zea mays
  Coding DNA Sequence Number=SeqID_41191
  Subcellular localization annotation: CTP_CleavageSite=29; ConfidenceScore=5.52e-01
MADLSSAQGAPVPLLLLSRTAAARPTFPRCAAPRRNAAVPASPGFLAATATRMPSARHNVKGDVLLQHVVTLAGCSLFLAQPRSRRRRPPPPSKSRSALGRSTKCQALWTAHVTSLDSSRLFTWYFVD

SEQ ID NO: 82971 - protein, 61 aa, Zea mays
  Coding DNA Sequence Number=SeqID_41192
MERDSEVVVGPPAPGPRISVESMPVQRVMGHRIARGIARRVLANAMEAPSLGSDRGRRRKG

SEQ ID NO: 82972 - protein, 187 aa, Zea mays
  Coding DNA Sequence Number=SeqID_41193
MHGSWRKEYGILTGDPGVDDAGRREQERTALPHYVDKASRVPCPLGSYLQSTRRRSDAQAPDTDWTELRIKDGERVQRRLTGMDSTLILGPGAGGPTAASLSLSITVMQSTLPRWGPFGGIPHTEFLGATTPQQSKLAADCNLADGEYVLIPEQGAVHEEDQEQAPETTIEDLLAAPAIEGKPRFYA

SEQ ID NO: 82973 - protein, 171 aa, Zea mays
  Coding DNA Sequence Number=SeqID_41194
  Homolog annotation: Hit_ID=Q8LLA0; Match level="QueryCoverage=84%, HitCoverage=24%, E-value=1e-08, Identity=34%"; Hit description=HCBT -like putative defense response protein
MEGSTWQCPNHVYAFGPARVRKLTGHGAVRARDRSPDSMAPEVSELADVIFTAMLLLLNYGLAYGAAFWLFLNTWSDINHRSSSDGGGGYTLSTPPPPASAGQMVPRHLPCGNPSTLWQAEGHRRPVTRTRAVQKCFFHFSAESTKRLKTKANTGNCNGHHLLIEVPALSP

SEQ ID NO: 82974 - protein, 359 aa, Zea mays
  Coding DNA Sequence Number=SeqID_41195
  Homolog annotation: Hit_ID=Q6ZCC9; Match level="QueryCoverage=34%, HitCoverage=26%, E-value=4e-26, Identity=49%"; Hit description =Putative AER
MAHHGEHTTMRKSLLLIKRQKPRSPVLDAVESATGCLPLVHIDDVCRTELFARRGGARPRGGTSAVGLNTTIAELARFLADKYPQYGVKTNLLSGERLEKPRVCLSSAKLLRFPLSPTLGLGKRGMKLILGVSYNALNKYLPPECFDLIKTPFISSKVSKVTGLLTLKTGFGMFQLGGDSGENTSGRYNYQCTKSGVPLKKPAVSNEAKIISWLLSSVEWQLATIMTKMEGSTGSVQIMSRRLVQPESGSSLDMVPSEPEIVHLTPWDLALFTVGHIQKGILLPKAGTGGAQLVDDLASSFASVLGHFYPLAGCLTASEITNGVVSPSLAITLCCNDECTEFIHVMAPEVTISRVVLPC

SEQ ID NO: 82975 - protein, 900 aa, Zea mays
  Coding DNA Sequence Number=SeqID_41196
  Gene Ontology: Mol. function=helicase activity; Cellular component =membrane; Biological process=viral genome replication
  Homolog annotation: Hit_ID=Q1EPC6; Match level="QueryCoverage=99%, HitCoverage=57%, E-value=0.0, Identity=70%"; Hit description=DNA helicase homolog, putative
  Pfam annotation: Domain name=DUF889; Domain location=584-803; Score =379.9; E_value=4e-111; Accession=PF05970.5; Description=Eukaryotic protein of unknown function (DUF889)
MQRKYKLTCPEQYDLLISAEIPSNKYPELRKMVIKHMMHGPCGSLNPNCPCTKGRASCKNQYPRHFHEATMQGKDSYPNYRRRDDGRKEKVRGCELDNRWVVPYNPYLLRLFNCHINVEECGSIKAVKYLFKYIYKGHDRVSVVMRDAGKENGDVDEIQQYRDARWVTPPEALRRIYGFELSQNSPSVMQLQLHLPNMHMVTFHERQMVERVVNRPGADRSMITAYFEANKLYEEARGILYRDFPEWYTWQQGKVWQRRKQNMGGQVGRIVSALPSEGERFYLRLLLNHVTGATSYVDLRTVDTDTLPSFHEAAQRRGLLEADNTIDECLNEAALYQMPSALRRLFATILVFCEPNDVAELWQRHLDTMSEYYHRITQSKTHLQQMVLIDIRNMLQSMGKDIKTFPLPAIIDRYDDSQGIDREIYEEEIIEATTEDVALQETLNEEQKSAYEKILSVVDTSNGGVFFVDGPSGTRKTYLYKALLAVLRSQDKIAVATAISRVAASIMPGGRTAHSRFKIPLTMDDGAICTFTKQSGTSKLLQKASLIIWDEASMAKRQSIEALDNSMRDIMGRPDLPFGGKTIVFGGDFRQVLPVVRKGSRAQIVAASLRSSYLWESMCHLKLVRNMRAKSDPWFAEYLLRVGGGTEEVNNDGDVRLPDEVCVPYTGDDRDLDRLIDDIYPSLNENMSNTSYITSRAILTTRNDWVDMINMRMIDRFQREQMMYHSFDTAVDDPNNYYPSEFLNTLTPNGLPPHVLKLKIGCPIMLLRNIDPANGLCNGTRLVHAGMRVFLPRVPLCPSDDEMFPFHFKRKQFPVRLSFAMTVNKSQGQTIPNVAVYLPEPVFSHGQLYVALSRATTRLNVKVLVIPVTDDKMNKGVEKKSTINGVTYTKNIVYKEVLTP

SEQ ID NO: 82976 - protein, 175 aa, Zea mays
  Coding DNA Sequence Number=SeqID_41197
  Gene Ontology: Mol. function=helicase activity; Biological process =viral genome replication
  Homolog annotation: Hit_ID=Q1EPC6; Match level="QueryCoverage=87%, HitCoverage=12%, E-value=7e-45, Identity=52%"; Hit description=DNA helicase homolog, putative
MDEVDAYCATHRASNDNDEDVGVFNPILHGKWLFQQFAVDTNIKIESSRLDFIRNNHNRLRTDLYQGLVDSMLDGDVRAEKVGKRTVLSASFIGGPRDMRRRYMDAMALELKHRLTKQDILDKVRAYVYVVEFQKRGLPHAHFLLIMQRKYKLTCPEQYDLLISAEIPSNKYPEL

SEQ ID NO: 82977 - protein, 314 aa, Zea mays
  Coding DNA Sequence Number=SeqID_41198
MAPLAGPDCLSVSLLSSGTAVGVAQAALSFCQTGQWSGEVTALYADGGYQLRIRRLEGTLIMVPDSSPRASKGVLALAWRLSSHFFARGPAFLGCILFRWVRASAPAGCSPRGLGGVVSLPRGLNALRNASAGLVVPSCELVVAQVHGRGPSSRAGMLTLSTVRPEPGLREQPPSLRTGREGDQGQTQLFYIRPYVAFPQGGGGESAMLPSMGTEHGVSGELQAGNPSGRPCPVRWGSARGPEARPKVPVGDLPDPVPWRRGPRARCLPPMGFRYKIAPAGLGNVLGYLGSTARALVMYRTYPWSSLARRLRRL

SEQ ID NO: 82978 - protein, 185 aa, Zea mays
  Coding DNA Sequence Number=SeqID_41199
  Gene Ontology: Mol. function=carboxyl- and carbamoyltransferase activity; Cellular component=ornithine carbamoyltransferase complex; Biological process=amino acid metabolic process
  Homolog annotation: Hit_ID=Q8SA97; Match level="QueryCoverage=61%, HitCoverage=23%, E-value=3e-19, Identity=47%"; Hit description =Ornithine carbamoyltransferase
MTPPVDVAGLRPRLGDVEAPPKARSSLSPVAEAESEPLGRARRRSSAKAKPESEPWVGRSGVRRLPGLSPSPSPGSGEAELPMAALSFCQAGQWSGEVTALYADGGYQLRIRSLEVSTQVLKCESMPMDEQSANLEQSQRAVSVWSTGLSGDAPDSVRWCTGQCPVRQAASAEEAALGNLLTAYG

SEQ ID NO: 82979 - protein, 108 aa, Zea mays
  Coding DNA Sequence Number=SeqID_41200
MSTETRHLDQIELLSVRRLLLNHLIISCGGGVRQQGLWEDPVQGSWLTAIAAKSTRDLPALTSPLLPLPLSGKVWTARQKLRNSGSIAQELLRLSYTADGLRVIFVIS

SEQ ID NO: 82980 - protein, 296 aa, Zea mays
  Coding DNA Sequence Number=SeqID_41201
MSTEKRHLDQIELLSVRRLLLNLLIFSCGGGVRQQGLWEDPVQGSWLTAIAAKSTRDLPALTSPLLPLPLSGKNNNKNWNIESYGLGLNFWKCQGPRSKTTETQRIVTNGRRVYFSETEGLLSKMDPRRGIGESEPLDLRPQDLESTVWILFTLESPDPSDQIRTDQISRPKRYADGAQQSSVDAGGTATADAPAPAANSGSTDHQSTAEMTPDQTPSHGEAYGPEFVGATAKYTELDRRRQRSHPRGAWRRSGGGERLGIKMGEGKGARGRPTCIPSGRPGSGREPVKSPAMSRR

SEQ ID NO: 82981 - protein, 271 aa, Zea mays
  Coding DNA Sequence Number=SeqID_41202
MNKNTRDTRFILRFGHTTKVPYFLVEAPTKSRVSFNPNPPFADHKDLKWERQEMCVREWEVFFKLEMGFWSCSSVGREGISIDDDSLDRHGGAGRDAGRSSARKLDARGDLGTSSEQEDRRSTEEAALGELGPGKRRAEPGAGTELDAGSSMAHGELNAGTRVALWLGVGGRAQGKKNRDTAWVGSFRARRAEGELQQGGRSWGRAAALGARRAVASRGMRRCAEEGEEGDGRAHQGGRNLEGGRAGAWEGVDPGVQLAAVGRKKTATSRR

SEQ ID NO: 82982 - protein, 97 aa, Zea mays
  Coding DNA Sequence Number=SeqID_41203
MNKNTRDTRFIPRFGHTTKVPYFLVEALTKSRVSFNPNPPFADHKDLKWERQQMCEREWEVFFKLEMGFWSCSSVGKSVGGVYKGAPKSWWPLGKSD

SEQ ID NO: 82983 - protein, 574 aa, Zea mays
  Coding DNA Sequence Number=SeqID_41204
  Gene Ontology: Mol. function=cysteine-type endopeptidase activity; Cellular component=vacuole; Biological process=proteolysis
  Homolog annotation: Hit_ID=Q10717; Match level="QueryCoverage=60%, HitCoverage=90%, E-value=1e-171, Identity=87%"; Hit description =Cysteine proteinase 2 precursor
  Pfam annotation: Domain name=Inhibitor_I29; Domain location=59-133; Score=39.8; E_value=9.1e-09; Accession=PF08246.2; Description =Cathepsin propeptide inhibitor domain (
  Pfam annotation: Domain name=Peptidase_C1; Domain location=162-377; Score=383.0; E_value=4.5e-112; Accession=PF00112.13; Description =Papain family cysteine protease
  Pfam module annotation: Pfam domain module=Inhibitor_I29::Peptidase _C1; Domain location=59-133::162-377
  Subcellular localization annotation: CTP_CleavageSite=47; ConfidenceScore=5.31e-01
MALRRQLALAVLALAATTAAANSGFADSNPIRPVTDRAASALESTVFAALGRTRDALRFARFAIRYGKNYKSAAEVQKRFRIFSESLQLVRSTNRKGLYGSTTASASTRVPDSHMFVMCGWCTGFADMSWEEFRATRLGAAQNCSATLAGNHQMRAAAAAAMPETKDWREDGIVSPVKNQGHCGSCWTFSTTGALEAAYTQATGKAISLSEQQLVDCGFAFNNFGCKGGLPSQAFEYIKYNGGLDTEESYPYQGVNGICQFKAENVGVKVLDSVNITLGAEDELKDAVGLVRPVSVAFEVISGFRLYKTGVYTSDHCGTTPMDVNHAVLAVGYGVENGVPYWLIKNSWGADWGDEGYFKMEMGKNMCAPEDGELRSARPRARTRAKAPEDGELRSARPRARTRAKAPEDGELRSARPRARTRAKAPEDGELRSARPRARTRAKAPEDGELRSARPRARTRAQPQKTTNFASPDPRARTPPWPLPNNLRLARPRSSGSASAMEDRLDLGFGGASTSPDLRHRPATSTGSAIITLPRADSGHREQDRLHCSSDSHDITPAGCQDLSGCHIGMYLGR

SEQ ID NO: 82984 - protein, 277 aa, Zea mays
  Coding DNA Sequence Number=SeqID_41205
  Subcellular localization annotation: CTP_CleavageSite=31; ConfidenceScore=5.03e-01
MKEKWENDCWAGSSTTAPLPLFPPRPSRPPRDAGYTTDGRAHAGRVTPRACLPLTRRRVGPGHSLSIHPHIWVSSVWAQLVGSIPFLALAHAPGPAYLATTNAATSAARIGRIPLTVPTARPESPRSRVLIGPNPPPPRRQPLRAGILHGTIFRLGARLRLHADRLRSLAIPKLAATTAAANSGITDPNSIRPVTDRAASALKSTSDALLGRQRCIPAATMGIERVAPQSTDESLGASLIHCATYLGGWTHGGPSGVAGIPHRRSCFVAGPLRAVDR

SEQ ID NO: 82985 - protein, 99 aa, Zea mays
  Coding DNA Sequence Number=SeqID_41206
MAKLATLLLLVLSCGSSNPLDRLSRWQGWRPSHTINQSSKEFYKSVVTVDRIQQSSYKIHNSQTIRNWIDSVTELMKSITSKRSGLWLSDFNTTPYETI

SEQ ID NO: 82986 - protein, 129 aa, Zea mays
  Coding DNA Sequence Number=SeqID_41207
MAKLGHATSPGPILRKQQPTRPYIPVAGMEAKSHHQSIIQVSTCKNYATSKAEYTNIQLDLPVTALVSTISGMGDHVSGQVRSKVRAWLHSDKCIPMDPCPQTIIIMLSKWIQPIPDLVRVLEKSLDLY

SEQ ID NO: 82987 - protein, 75 aa, Zea mays
  Coding DNA Sequence Number=SeqID_41208
MGDKDGDICVVWRVGGYWEAEQRSCVAQNNPRVIDVGDDHEVPCLTMDNAEQPLCTASKRWRRQSLSYIAAHTTT

SEQ ID NO: 82988 - protein, 93 aa, Zea mays
  Coding DNA Sequence Number=SeqID_41209
  Gene Ontology: Mol. function=protein phosphatase type 2C activity
  Homolog annotation: Hit_ID=Q2HW33; Match level="QueryCoverage=95%, HitCoverage=40%, E-value=3e-13, Identity=33%"; Hit description =Protein phosphatase 2C-like
MAPCAAMYDKLWRRHRLDAVQSGCSALSIVKQGDLMVVANIGDSRPSQESLVLGMSRAFDDYYIEDCGVILAPEVTQRRTDNNDQFVILATVG

SEQ ID NO: 82989 - protein, 107 aa, Zea mays
  Coding DNA Sequence Number=SeqID_41210
MRLSQNTLNTKQPAKVSKDDGGGPLGEEELCDGRGTTARPASLCEQQKLDADGVQQRRDSRACVRGVGSDDFGSAGGSWAPVGTRPGSGPRAQGHSAAGDLGGRLRR

SEQ ID NO: 82990 - protein, 119 aa, Zea mays
  Coding DNA Sequence Number=SeqID_41211
MRLSQNTLNTKQPAKVSKDDGGGPLGEQQKWNNTVGAREWIGAQLHDYAPATRFELDLSSTTTYTARHKQQDARQAPARDCAARWQAAVARGNGGQQHSVTTWVQQGQDASRDSASSFK

SEQ ID NO: 82991 - protein, 116 aa, Zea mays
  Coding DNA Sequence Number=SeqID_41212
MRLSQNTLNTKQPAKVSKDDGGGPLGEHDEAAQGCRRTPANEIGKQQDQQGVVAGRLWRMKLRRRRAAASGEAPGALNRSRLPVLDEQDKEASVEEKSENAGEKKMVVPFIGDQGE

SEQ ID NO: 82992 - protein, 209 aa, Zea mays
  Coding DNA Sequence Number=SeqID_41213
MRLSQNTLNTKQPAKVSKDDGGGPLGEGDVELGRSSWFYGGLPSWSRVRRRGARELTNVLAGDVESAEAPATGARRAMQARNCEEQSQGMRPAIYRKREKAEVEETVDGVLNSHYDGGGFSAINALNGRLGHGAGASGSAAGAVVAAQQGGRAALEVGRLGGVRDQLNCPLGPVQLVLSREFRRENPSSTARRQVQLLKKLNSAEVQLS

SEQ ID NO: 82993 - protein, 142 aa, Zea mays
  Coding DNA Sequence Number=SeqID_41214
MSNFIVVQGQHVLNVDLSLSSAHGKPPDVTIGEGAFLLEQRDGGLDRMEVGGEKAWVALRPTSNASRDGNGYPKPEYPTGFTRYEGGYEMISLPAGMLMGKNLYPLGRRVRVMGLVLPIPVYPWVEYTRINSTNKHLIKSTY

SEQ ID NO: 82994 - protein, 137 aa, Zea mays
  Coding DNA Sequence Number=SeqID_41215
MSNFIVVQGQHVLNVDLSLSSAHGKPPDVTIGEGAFLLEQRDGGLDRMEVGGEKAWVALRPTSNASRDGNGYPKPEYPTGFTRYEGGYEMISLPAGMLMGKNLYPLGRRTMTGLLVHVLLPRLLRVQLHTQIVVQAV

SEQ ID NO: 82995 - protein, 106 aa, Zea mays
  Coding DNA Sequence Number=SeqID_41216
  Subcellular localization annotation: CTP_CleavageSite=40; ConfidenceScore=5.12e-01
MADLSSSVQGAPVPLLLLPRAAAAESFFLPLLSTERHPVFCVEKASRSTLVGCSERCTNRNRHRPYKHQLGLFMCDGIHDYIGSIFIDVTGSLENASLRGECIVKT

SEQ ID NO: 82996 - protein, 136 aa, Zea mays
  Coding DNA Sequence Number=SeqID_41217
  Subcellular localization annotation: CTP_CleavageSite=19; ConfidenceScore=5.49e-01
MQHRCSCSPGPSPGFLAASAARVPRARQNVLVGCCAERTPCFAWRRQVVQRSSDARSDAQIGTAIVLTNTDWVCLCGRATLIEVSRVDATIWLYARQGYAHVYVASRIAAIIVKLTCMLFSGDVVALVNRIVRRRG

SEQ ID NO: 82997 - protein, 66 aa, Zea mays
  Coding DNA Sequence Number=SeqID_41218
MAAGSNDCGFYVMGYILFYGCVEGSLRSDIEAGNTSEIRSLALHYITFHRKNKALSQLEDTQRFKV

SEQ ID NO: 82998 - protein, 85 aa, Zea mays
  Coding DNA Sequence Number=SeqID_41219
MARISPPNADLGHDTDANPNENHSLLEIDSDSVGSRLQDKRSRRNEESCSFTSSNRESWGRCSYLGAASDESFSGDNNDKQVDWL

SEQ ID NO: 82999 - protein, 272 aa, Zea mays
  Coding DNA Sequence Number=SeqID_41220
  Homolog annotation: Hit_ID=Q10L49; Match level="QueryCoverage=21%, HitCoverage=10%, E-value=3e-11, Identity=56%"; Hit description =Expressed protein
MANEDLYGHHLQGLTDIEKFLGDKNIIKFDGDHNSPRPQSYYDSVSIFFYKSLHPPLLPAARSKLHMGAFKVGNITNENFFFEIINGLRPANTAGCSSSTDAPNIPHDGTSVIELLSDSMNQLSIKNENHLDFLLDENHSLPEIDSDSVGSRLQDKRSRRNEESFSFTSSNRESWGRCSSLGAASDESFSGDNNDKQNLTVKALATPVRQNQRQSQRKPIEKAKQKKIQALWKKIKREKVEMGDSLSSRLKMCLGQSPQHKRNRSSGTITTS

SEQ ID NO: 83000 - protein, 121 aa, Zea mays
  Coding DNA Sequence Number=SeqID_41221
MAVVCANCSGLDDGVEDLMHAVLQRQEHVVQHRNKVWTRSCLYNPAKYNTLKTKNYTSSAMISKSSVYTRIGNTVLPKVIYSPTQNDREPVFWNYVPKLHLKATGNISPLVWKGDDNVAGN

SEQ ID NO: 83001 - protein, 497 aa, Zea mays
  Coding DNA Sequence Number=SeqID_41222
  Homolog annotation: Hit_ID=Q9C815; Match level="QueryCoverage=33%, HitCoverage=64%, E-value=2e-49, Identity=61%"; Hit description =Peptide chain release factor, putative; 8726-9996
  Pfam annotation: Domain name=Beach; Domain location=345-497; Score= -55.4; E_value=2e-13; Accession=PF02138.8; Description=BeigeBEACH domain
  Pfam annotation: Domain name=RF-1; Domain location=89-189; Score =14.3; E_value=4.9e-06; Accession=PF00472.11; Description=Peptidyl -tRNA hydrolase domain
  Pfam module annotation: Pfam domain module=Beach::RF-1; Domain location=345-497::89-189
  Subcellular localization annotation: CTP_CleavageSite=32; ConfidenceScore=5.15e-01
MARALLLLRVAVARYPPLPASPALLQPQPLLRCHAPSQYKSQLRFLSSLSSSVPNSSDAPSDGGGDRDGEEDGAKSGSHVDYLGMSDEELMEQCDMGTFKASGPGGQHCNKRESAVRLKHLPIGIIAQAVEDRSQHKNRASALSRLRTLIALKVRRPINLEDYTPPVELLQILPLKSSVRGNDVGPQIGPNNSKFSPGMQALLDLLFAVEDSVSDAAKILGLSTGALSRLILSDDSLRTAANELRASKCFFDCRAPVLYYVLLTLQDSVHKVFYAVVEAAAVRADNSHLGGLARYPVSATLPQIGSRLFLTWGVFWSFPEMAPFTSTNRYLIPILYVSVELVKALQAHIINWDIHMFDEEIGNTTQVHTSNLNEPMRTLAGFIQFCLIKPGGKFDHADRLFQSIENAYINSLSNTSDVKELIPEFFYMPEFLENSNSYHLGVKQDGEPIGDVALPPWAKDDNSSDEFDKDSIESDDRSLEELSWETLELLVVPHIFR

SEQ ID NO: 83002 - protein, 198 aa, Zea mays
  Coding DNA Sequence Number=SeqID_41223
  Gene Ontology: Mol. function=zinc ion binding
  Homolog annotation: Hit_ID=Q655H8; Match level="QueryCoverage=43%, HitCoverage=5%, E-value=5e-33, Identity=77%"; Hit description=LvsC -like
  Pfam annotation: Domain name=Beach; Domain location=62-198; Score= -72.1; E_value=2.7e-12; Accession=PF02138.8; Description=BeigeBEACH domain
MAPLDPSLHASQVNDVEPLAPLGHASVPPRSPLARLPSPQSPNSAHEGGTGGDGVCGVGDGTARSVYHHFPPRRRSYLVAAMHMASETISEGGKFDHADRLFQSIESAYINSLSNTSDVKELIPEFFYMPEFLENSNSYHLGVKQDGEPIGDVALPPWAKDDNSSDEFDKDSIESDDRSLEELSWETLELLVVPHIFR

SEQ ID NO: 83003 - protein, 434 aa, Zea mays
  Coding DNA Sequence Number=SeqID_41224
  Homolog annotation: Hit_ID=Q655H8; Match level="QueryCoverage=19%, HitCoverage=5%, E-value=5e-32, Identity=78%"; Hit description=LvsC -like
  Pfam annotation: Domain name=Beach; Domain location=1-126; Score= -107.6; E_value=6.6e-10; Accession=PF02138.8; Description=BeigeBEACH domain
GGKFDHADRLFQSIESAYINSLSNTSDVKELIPEFFYMPEFLENSNSYHLGVEQDGEPIGDVALPPWAKDDNSSDEFDKDSIESDDRSLEELSWETLELLVVEVIAPAVIGTTNVLKACYEAKVKRVVVVSSCGAVYANPIYPKADIETVENVLSNMVDIRDVADALLLTYEKPEASGRYICSSHAIKISDMINILKTMYPSYPYPKRSRLRPLKGHDLASGKGSRSGRIHVSPEGPLKQRTHLRLARGPDRAGFAEKQPWPDHYTNRPYRRSIQCKDRLTPYPDARSSDDKAEPLRLASGAIGSSASPDPRARTPPRPRKTDSASLDHRAQTQPRPRKTDSASPDHRARTQPRPRKTVSTSPDHRARTQPRLRKAVSASPDPRARTQPRPRKTVSASLDPRAQTQLRPRRSLRLARPRARTDHVTGGASLPYP

SEQ ID NO: 83004 - protein, 233 aa, Zea mays
  Coding DNA Sequence Number=SeqID_41225
  Homolog annotation: Hit_ID=Q6K9C3; Match level="QueryCoverage=40%, HitCoverage=50%, E-value=7e-25, Identity=59%"; Hit description =Putative splicing factor RSZp22
  Pfam annotation: Domain name=RRM_1; Domain location=4-63; Score=4.0; E_value=0.061; Accession=PF00076.12; Description=RNA recognition motif. (a.k.a. RRM, RBD, or
  Pfam annotation: Domain name=zf-CCHC; Domain location=79-96; Score =32.5; E_value=1.4e-06; Accession=PF00098.13; Description=Zinc knuckle
  Pfam module annotation: Pfam domain module=RRM_1::zf-CCHC; Domain location=4-63::79-96
MAGVYVGNLDSRMEVANCCSQCTVWVARKPPGCAFIDFDDRRDAEDAISDLDGKNGWRVELSRNSSGRGGRDRYGGSESKCYECGETGHFARECRLRIASGGLGSGRRRSRSRSRSRSGSPRYRRSRSRSRISVDEAHAFIYMNIFLTMFFFFLFSCHANQWALLPLFLRPVVRFAARVAEGGPAVAVATILHRAGALSRNRGLERLVRDDELHGRGQDCIASFVIGVIRCLC

SEQ ID NO: 83005 - protein, 163 aa, Zea mays
  Coding DNA Sequence Number=SeqID_41226
  Gene Ontology: Mol. function=nucleic acid binding; Cellular component= nuclear speck; Biological process=nuclear mRNA splicing, via spliceosome
  Homolog annotation: Hit_ID=Q6K9C3; Match level="QueryCoverage=57%, HitCoverage=50%, E-value=5e-26, Identity=60%"; Hit description =Putative splicing factor RSZp22
  Pfam annotation: Domain name=RRM_1; Domain location=4-63; Score=4.0; E_value=0.061; Accession=PF00076.12; Description=RNA recognition motif. (a.k.a. RRM, RBD, or
  Pfam annotation: Domain name=zf-CCHC; Domain location=79-96; Score =32.5; E_value=1.4e-06; Accession=PF00098.13; Description=Zinc knuckle
  Pfam module annotation: Pfam domain module=RRM_1::zf-CCHC; Domain location=4-63::79-96
MARVYVGNLDSRMEVANCCSQCTVWVARKPPGCAFIDFDDRRDAEDAISDLDGKNGWRVELSRNSSGRGGRDRYGGSESKCYECGETGHFARECRLRIASGGLGSGRRRSRSRSRSRSGSPRYRRSRSRSRISVDEAHAFIYMNIFLTMFFFFLFSCHANQWV

SEQ ID NO: 83006 - protein, 222 aa, Zea mays
  Coding DNA Sequence Number=SeqID_41227
MAELSDVCSMAASNLPMAENLTPSSFNPSSLRLHPWRDALCLSPWAPGRAHHSSGSPPFRHGQLQPALHLPWCPEIPADHPPSPKQRQLAPPPLAAQPLGETPLFLQRIPDALPCSSSLPHKTAAAASSLSSMASSLPRCAGALLPPKDSAPISLSRQRSAPQPSFPCSPTKSTRRRCSTKCAASRVLPAHCSVKHSGQHAVDTRRLYAVFGAAPLATSSTP

SEQ ID NO: 83007 - protein, 250 aa, Zea mays
  Coding DNA Sequence Number=SeqID_41228
MSRAGLRQKQRTTGECRRRAVHCASRNRKTWLRGAALPGEGNRGAVLGRKKSSCASREAARHGRQRARCGCCFVGKRGGAGEGVGDPLQEQRRLAEGLRSEGRWGELPLFGGRRMVCWNFWAPWEVERGLQLAVPEGRRARGVVRASRCPGRKAEGVAPWMKAQGTWIEAGRRQVLGHGEVAGGHGANIRELGHGCSAGAIDPRILNLLCPAHSGAWGGRRLLEEEGEEGAGSLELELRRCHGRCCCRVP

SEQ ID NO: 83008 - protein, 381 aa, Zea mays
  Coding DNA Sequence Number=SeqID_41229
MDDSELAADAVLWGREEEQGRASGIRCRNSGVSPRGCAARGGGASCRCLGEGGWSAGISGHHGRWSAGCSWPCLKRGEPEEWELGLKLDGVKFSAMGRLLAAMEQTSEKVATREHGEGDACLRKKGRRVQGAWSWSFAGAMGGKTWLRGAALPGEGNRGAVLGRKKSSCASREAARHGRQRARCGCCFVGKRGGAGEGVGDPLQEQRRLAEGLRSEGRWGELPLFGGRRMVCWNFWAPWEVERGLQLAVPEERRARGVVHASRCPGRKAEGVAPWMKAQGTWIEAGRRQVLGHGEVAGGHGANIREGRDQGESRGVGVLPGSSAMAALLGAIDPRILNLLCPAHSGAWGGRRLLEEEGEEGAGSLELELRRCHGRCCCRVP

SEQ ID NO: 83009 - protein, 212 aa, Zea mays
  Coding DNA Sequence Number=SeqID_41230
MKSNKERRGLTGVNDDDNGAAQKQQTTGGHHSVLQQHISLDILPNTWHARGGGSETKRAKVSGLLFCGEERGQGPKTGRHWPLAMGGARMGAMLPWETSLGVLHGCSDLGRSRGLFQALKHGGAEEGKGEIAGGAMDDGELAAAAVLWGREEEQGPRAGRHCSCYFPWERKKIGRREQQLWTGKVEVGHGRSRWGEAPREKVAPWEGKSRAP

SEQ ID NO: 83010 - protein, 156 aa, Zea mays
  Coding DNA Sequence Number=SeqID_41231
MMRVLLVEILVHDPAKRPVVVRHLFASSPVRAAVAVCRWDSPRSCCAVTPRHCHRPPDSTCCAARRRRRHLLLHVIVARCASTTSSLENLNTPENHATPRYSDQHLGTACLALVGVQQHWRRVFVPSPTDSLTPATMKPTTSCSIVPRLKVENSIF

SEQ ID NO: 83011 - protein, 214 aa, Zea mays
  Coding DNA Sequence Number=SeqID_41232
LPISLDSRTLELPSLCRRRSHDASAKPLPKPLLLAAVHPLSPCALGSLQHVSAQRRYSMMRVLLVEILVHDPAKRPVVVRHLFASSPVRAAVAVCRWDSPRSCCAVTPRHCHRPPDSTCCAARRRRRHLLLHVIVARCASTTSSLENLNTPENHATPRYSDQHLGTACLALVGVQQHWRRVFVPSPTDSLTPATMKPTTSCSIVPRLKVENSIF

SEQ ID NO: 83012 - protein, 65 aa, Zea mays
  Coding DNA Sequence Number=SeqID_41233
MTGSIREEPEAEHHLRVEKARDSLRSYSTEFRESFRSPNSPPLRRHPFPLVVMNIIEVRNTKRRR

SEQ ID NO: 83013 - protein, 201 aa, Zea mays
  Coding DNA Sequence Number=SeqID_41234
MGKPVPSLLMLLLSRGRVPLDSPTRWQGGRPSYPSNHLLQRTCKNFATSKAEYTNTQLDLPGYNGSSSLISCEKQTIRIEFLSLQVDALVPTITGMGDLVSGRVRGKVCGQVHSGTRLTDLPYFSVMHKTGACLPKQWQAGPLVLALVLDLGLPPEQLLAPARGCTLRQQDYSLANAMNMYVMIMHDLITLCKKRLSQEVT

SEQ ID NO: 83014 - protein, 106 aa, Zea mays
  Coding DNA Sequence Number=SeqID_41235
MGDLVSGRVRRAICGQVHSGTRLTDLPYFSVMHKTGACLPKQWQAGPLVLALVLDLGLPPEQLLAPARGCTLRQQDYSLANAMNMYVMIMHDLITLCKKRLSQEVT

SEQ ID NO: 83015 - protein, 104 aa, Zea mays
  Coding DNA Sequence Number=SeqID_41236
MGKPAPSLLMLLLSRGGVPLDSPTRWQDGRPSHSSNHVLQQHGSSSLISCEKQTIRIEFLSLQVTALVPTITGMGDHVSGRVRGYVCGQVHSGTRLTDLPYFSD

SEQ ID NO: 83016 - protein, 174 aa, Zea mays
  Coding DNA Sequence Number=SeqID_41237
MGKPVPSLLMLLLSRGRVPLDSPTRWQDGRPSHSSNHFLQRTCKIYATSKAEYTNTQLDLPGYNGSSSLISCEKQTIRIEFFYPCKIRAHRLGVQCLTDPDCRRAVTALIPTLTGMGDLVSGRVRGYVCGQVHSGTRLTDLPYFSGLPPILQSLSAVAGRSSGADSGAGSGATS

SEQ ID NO: 83017 - protein, 204 aa, Zea mays
  Coding DNA Sequence Number=SeqID_41238
MMIWCQFRLQILKHLVHPINIIFTVINFYFCCSFNIFTMEIPDLIAWHETMRTQDVYLNDKAATALGEAVGTGGGTRGGDRRRRRTWGCGGAWRACRSDGRRWRRPTGEAIAAAAGSGRGGVVVGRLLGAAPGRYGSGGGGGGWGRGGAGRGWGWGCWGRAGSGRRRGLGRRDGGAWGGAVGLGEARRRGLGTAAAELGDGACG

SEQ ID NO: 83018 - protein, 168 aa, Zea mays
  Coding DNA Sequence Number=SeqID_41239
MMLLVGLALQELSQNLILLGHQLLHCGSWGRWRGSLLILPATLPSCHLKTEIVAIGYINQGKADVDYLTPVGQGENRRGLTVYERGFARADAFCLSVFNRSRHRLAPPPPRLPKPHRASPSPAVAPPQAPPSPRPHAAPAAPAPAPSAAAPAPSTAAAATPVPARRRP

SEQ ID NO: 83019 - protein, 76 aa, Zea mays
  Coding DNA Sequence Number=SeqID_41240
  Subcellular localization annotation: CTP_CleavageSite=38; ConfidenceScore=5.42e-01
MARTRAYKSHSGVDHTLPRTLKPHRSSTHRRLPVHGLSAATRAPAAIDRPVQPFPTPSNPRRRSLRHPVKLTVPLD

SEQ ID NO: 83020 - protein, 96 aa, Zea mays
  Coding DNA Sequence Number=SeqID_41241
  Subcellular localization annotation: CTP_CleavageSite=86; ConfidenceScore=5.49e-01
MARTRAYKSHSGVDHTLPRTLKPHRSSTHRRLPVHGLSAATRAPAAIDRPVQPFPTPSNPRRRVKKNRKGDLNNEPEGTPIFVRICWDYASSPKVL

SEQ ID NO: 83021 - protein, 157 aa, Zea mays
  Coding DNA Sequence Number=SeqID_41242
  Subcellular localization annotation: CTP_CleavageSite=88; ConfidenceScore=5.24e-01
MARTRAYKAHSGVDHTLPRTLKPHWSLTHRRLPVHGVSAATRAPAAIDRPAQPFPTPSNPRRRVKKNRKGDLNNEPEGTSIFVRIFVQSSSLEKSIIPWFNCNLADGEYVLVPEQGAAQKVAPDPAPEPALEDLPATALEGKPRFMHNLLFMLFYYT

SEQ ID NO: 83022 - protein, 208 aa, Zea mays
  Coding DNA Sequence Number=SeqID_41243
  Subcellular localization annotation: CTP_CleavageSite=88; ConfidenceScore=5.24e-01
MARTRAYKAHSGVDHTLPRTLKPHWSLTHRRLPVHGVSAATRAPAAIDRPAQPFPTPSNPRRRVKKNRKGDLNNEPEGTSIFVRIFVQSSSLEKSIIPWFNCNLADGEYVLVPEQGAAQKVAPDPAPEPALEDLPATALEGKPRGLYPSRDLRHGLPFRLWWVQVRSLHDGSRGSLEDMVAGVTWPSILPPGWTVEWDPTSAEEEHEE

SEQ ID NO: 83023 - protein, 130 aa, Zea mays
  Coding DNA Sequence Number=SeqID_41244
MASLEPSTWWGRMLFTARLEIATRAPCLHTVVRGTPDSGYRQWPPGLPQGREPAPKEDDSWAQAPVPETGLSVSAGAKRHTTAGGGTLFTRQFAFSAHRTWRARCMTCGPGPPCQRLDRWLRRRRGGTIP

SEQ ID NO: 83024 - protein, 95 aa, Zea mays
  Coding DNA Sequence Number=SeqID_41245
MAPRILCDDGGSQPPYGSKRTGYWKPVGYPKPHGYEFGQNFIPVMGMSFLAGVFFLRGYGFGQVISSGFLPIDISMRVQDKDSGLSLSNRRNCNA

SEQ ID NO: 83025 - protein, 78 aa, Zea mays
  Coding DNA Sequence Number=SeqID_41246
MAMGTRYPKPVGMGNPLGTRNPHGYGFGQNFIPVMGMGFLVGVFCLRGYGFGQVIPSGFLPIAISSLTPFETFVRDIC

SEQ ID NO: 83026 - protein, 85 aa, Zea mays
  Coding DNA Sequence Number=SeqID_41247
MAMGTRYPKPVGMGNPLGTRNPHGYEFGQNFIPVMGMSFLAGVFFLRGYGFGQVIPSGFLPIAISSPTLIQRPEFLHTPSAQPFC

SEQ ID NO: 83027 - protein, 92 aa, Zea mays
  Coding DNA Sequence Number=SeqID_41248
MAGPRTRIEMAMGTRYPKPVGMGNPLGTRNPHGYEFGQNFIPVMGMGFLAGVFFIRGYGFGQVIPSGFLPIAISRRAQIWVDFKLLSVILVA

SEQ ID NO: 83028 - protein, 171 aa, Zea mays
  Coding DNA Sequence Number=SeqID_41249
  Gene Ontology: Mol. function=cysteine-type peptidase activity; Biological process=proteolysis
EKRDHLHDSAAPQNKRGTPRIKYFDRNIIQALTRADKGKIRKGEEAFGHCSHKTRTNTFDVPRPDPSGQHSIHIELPLIRDLISSKLNQLPSRHRLGFIEKLSHFDAEVGKACSVIKQTLQQIVEKQYNLSDVFGELIDEVLRAEAGDNEDAYDVQKTTSKSDDILPQTAG

SEQ ID NO: 83029 - protein, 760 aa, Zea mays
  Coding DNA Sequence Number=SeqID_41250
  Gene Ontology: Mol. function=cysteine-type peptidase activity; Biological process=proteolysis
  Homolog annotation: Hit_ID=Q53MK8; Match level="QueryCoverage=51%, HitCoverage=42%, E-value=5e-24, Identity=24%"; Hit description=Ulp1 protease family, C-terminal catalytic domain, putative
  Pfam annotation: Domain name=Peptidase_C48; Domain location=521-753; Score=-29.3; E_value=0.085; Accession=PF02902.9; Description=Ulp1 protease family, C-terminal catalytic domain
MKNVDRPPSNPKRIIIQSTQECFSVDIPRAPAGTVRPETRHAANEDDDFMPLSKKRNLDDNPGKVLKKIQQQAIARRGFSSILDMRLDALGSRSHLAWLMEKLDHNDMTIRAGPGKELKITKDTVHLILGLPNAGGGTALGIDEAVAANNLRAELDLSKEEFGVTALQDRRLRKGSDDDLSIRCFFLILFNRLLFPTVSWGITNHEVLLTEEMDRFHQMDWCQLIFNDLCQAAKKWHNRSVTNVSTTTYGCSIVILLYYLDHLHDSAAPQNKRGTPRIKYFDRNIIQALTRADKGKIRKGEEAFGHCSHKTRTNTFDVPRPDPSGQHSIHIELPLIRDLISSKLNQLPSRHRLGFIEKLSHFDAEVGKACSVIKQTLQQIVEKQYNLSDVFGELIDEVLRAEAGDNEDAYDVQKTTSKSDDIRPQTAEGCTCPATLTVPDMSTPVSQQDTQFTDTQVYVETDQATNTPQVGQASLDSEMQTVLALREYLCGLQSDTGRTIIDYGEYSATCSDIYKSFADGKCLDNVFMQCFTQCVIDDAKNQQTSMSSNSLILDVNIGSLLNFEEHERHSRNPQPFDESVLHTLLDNSLPEIDELDQCKAIMVPMVSRGHWTLYVVNKVKKCIHILDSNPYGPTLGGTTWKDYHFAHLGSGGRKLPWAKVIMSRLNKAIQHVRPSTCFPKFGNFTIDLCPNCPNMAAGSNDCGFYVMGYILFYQCDEGFLRSDIEAGNTSEIRSLALHYITFHPKNKALSLLQDIQRFKV

SEQ ID NO: 83030 - protein, 94 aa, Zea mays
  Coding DNA Sequence Number=SeqID_41251
MALQSGSNVRRLKERSWIGAAEIDWQIASDAGEVTSAVGVTGFPGEVASAAGVTGFPSYSAVVEAVIPDSRGFLSVDCAKTVLETEKRGGRGLG

SEQ ID NO: 83031 - protein, 223 aa, Zea mays
  Coding DNA Sequence Number=SeqID_41252
  Subcellular localization annotation: CTP_CleavageSite=62; ConfidenceScore=5.48e-01
MLIWVEPDLVNSFQSRRRYTVSHVSPSHVSLVSRFLKPSLRNQPRETRVDRKETPVTASSFLASEATRQRFPPLQSSAAPIQLSSFNLRALEPDSRANAFLEVPDVYERFIQCLIMRSVDRPPSNPKRLTIESSQEVFSIDISRRTRSSSSAHQDDNPHNQKQNEPQPTPVHRFRRKALACHVKRKPPAPSTLSDDDFMDAPSLKRQFRSTSPSPTEKTVQRR

SEQ ID NO: 83032 - protein, 385 aa, Zea mays
  Coding DNA Sequence Number=SeqID_41253
MSRNCPVFVKCDRGSASKDKITSNAEPAEAKLQQESRLKDESKETTDNSKETSTATEEWLQLWCTTNGRRPAILVVHNLCGLFTLQLLACSPLQWRAVHVQRLSTLSTLWGDYVQEMLENIFDCLYCVFRVLENKESLMYEEDKGNDSDVGDIHVLVREGATDGNVQLVILGDGVPVWIPPWPSFSGDIQQLELMVLSESEFSPTLLIDRLSPQFSGVQTVGQPLMVKVANGQVFQYTCSIPEATWSMSDSFSIGAVVGLLLISEEHQVKSSVDQLQAIEEFCDRLAEEAQTEVVPELSKYLLMAISAAAWTDYDAVTTLFPKGQLPQHELLTMANGRTLPCRYQLAVAVWSRSGYQFSAKFNPLTLTSFAVDELGLEVFWKKEL

SEQ ID NO: 83033 - protein, 356 aa, Zea mays
  Coding DNA Sequence Number=SeqID_41254
AKLQQESRLKDESKETTDNSKETSTATEEWLQLWCTTNGRRPAILVVHNLCGLFTLQLLACSPLQWRAVHVQRLSTLSTLWGDYVQEMLENIFDCLYCVFRVLENKESLMYEEDKGNDSDVGDIHVLVREGATDGNVQLVILGDGVPVWIPPWPSFSGDIQQLELMVLSESEFSPTLLIDRLSPQFSGVQTVGQPLMVKVANGQVFQYTCSIPEATWSMSDSFSIGAVVGLLLISEEHQVKSSVDQLQAIEEFCDRLAEEAQTEVVPELSKYLLMAISAAAWTDYDAVTTLFPKGQLPQHELLTMANGRTLPCRYQLAVAVWSRSGYQFSAKFNPLTLTSFAVDELGLEVFWKKEL

SEQ ID NO: 83034 - protein, 288 aa, Zea mays
  Coding DNA Sequence Number=SeqID_41255
  Pfam annotation: Domain name=IQ; Domain location=13-33; Score=23.6; E_ value=0.00068; Accession=PF00612.17; Description=IQ calmodulin -binding motif
  Pfam annotation: Domain name=IQ; Domain location=55-75; Score=27.0; E_ value=6.6e-05; Accession=PF00612.17; Description=IQ calmodulin -binding motif
  Pfam module annotation: Pfam domain module=IQ::IQ; Domain location=13- 33::55-75
MFHRYKEKTEKELQAAVRLQTAARGFLARRQVQSLRGEKHLAVASRATPWPSSHEQAVVRLQAAVRGFLVRRAVRKLHLLISSSLHQLAACVPNHQVSSILFEPPAEVEIWVCSPPARPKRVVSFIRAPALVLDRPNIRTGWFLLHLSSNVKAAIQLFPWDPGGQEDIAAVQIYILVPQLFYIFVLNNKARGQAGPQGRGRCHGHHRERSLMWGRTYVRQKREAAGGAGSSARKEGTGAGSSARKEGMAKESAHKEGMAKEGMAKESAHKEGMAKESACKEGMAKEGD

SEQ ID NO: 83035 - protein, 279 aa, Zea mays
  Coding DNA Sequence Number=SeqID_41256
  Gene Ontology: Mol. function=protein serine/threonine kinase activity; Cellular component=membrane; Biological process=protein amino acid phosphorylation
  Homolog annotation: Hit_ID=Q1EPK4; Match level="QueryCoverage=75%, HitCoverage=52%, E-value=5e-74, Identity=55%"; Hit description =Protein kinase family protein
  Pfam annotation: Domain name=Pkinase; Domain location=30-227; Score= -81.4; E_value=0.001; Accession=PF00069.15; Description=Protein kinase domain
  Pfam annotation: Domain name=Pkinase_Tyr; Domain location=58-247; Score=-66.7; E_value=2.2e-08; Accession=PF07714.7; Description =Protein tyrosine kinase
  Pfam module annotation: Pfam domain module=Pkinase::Pkinase_Tyr; Domain location=30-227::58-247
  Subcellular localization annotation: CTP_CleavageSite=66; ConfidenceScore=5.16e-01
MGWPWRPQQGASPHEGTVPGGVPGTLALPSEAAPLLGVPSLSSPCSGGTSQRTDPTALRNGQNSLRAEGQAEKEFRVEVEAIGHVRHKNLVRLLGYCVEGIHRMLVYEYVNNGNLEQWLHGMNQHGVLSWENRMKILLGTAKAYVAPEYANSGMLNEKSDIYSFGVVLLECATARDPVDYSKPADEVNLIEWLKMMVTSKRAEEVVDPNLNVKPPKRALKRTILVGFKCVDPDADKRPKMSHVVQMLEAVQNAYHEDQSKLSQVGSQQSLEETSNSADA

SEQ ID NO: 83036 - protein, 80 aa, Zea mays
  Coding DNA Sequence Number=SeqID_41257
MGSRHSACSAEAECRGSFVLLLLVTLLRGERYLIRDGWFTGGDKDDGLTMVMITDQQFVAADITNQQSIAFIQIDNYKDT

SEQ ID NO: 83037 - protein, 82 aa, Zea mays
  Coding DNA Sequence Number=SeqID_41258
MGSRHSACSAEAECRGSFVLFLLVTLLRGERYLIRDGWFTGGDKDDGFFIMIIGMVAFGAIYAQMPLDHNLLVFWDSFLFHH

SEQ ID NO: 83038 - protein, 242 aa, Zea mays
  Coding DNA Sequence Number=SeqID_41259
  Homolog annotation: Hit_ID=Q10P18; Match level="QueryCoverage=94%, HitCoverage=96%, E-value=1e-30, Identity=58%"; Hit description =TB2/DP1, HVA22 family protein, expressed
  Pfam annotation: Domain name=TB2_DP1_HVA22; Domain location=4-119; Score=-25.4; E_value=0.0095; Accession=PF03134.9; Description=TB2DP1, HVA22 family
MDPSCIYLINSRLAFGYAYPAYECYKTVELNKPEIAQLIFWCQYWKGVSISYAVAILTSVNNLPNLGLFPVSRILVALLTVLERFGDFIISWLPFYSKAKSVFFVYLWYPKTKETKPVQSSPKIKCQTLARSGSVASTKPLVAASAPKPGGSPKKGEVKPTADLVQTPTTCADSPKPEPSAPSLPGAEGVDKMAINEASGDALEGAEELDPALEEETPMEETICVTRAKLRRRTATEVPAGN

SEQ ID NO: 83039 - protein, 160 aa, Zea mays
  Coding DNA Sequence Number=SeqID_41260
  Homolog annotation: Hit_ID=Q7FS85; Match level="QueryCoverage=42%, HitCoverage=23%, E-value=5e-12, Identity=60%"; Hit description =Putative 4-coumarate-CoA ligase-like protein
MEATTLTALLKEAVAAFSTRRAVAVPSRLELTHVVLDALIDAVAARLAADAVFLLGHVVALSFPNTIEESGPDARAWKGIEESALSSLSFGPLSSSGGITVVTSKADAVTMRMVSHRGVVQVVLVSAIAWVMLGLVALAFHLRPCISPVAFLSGQPRCCP

SEQ ID NO: 83040 - protein, 110 aa, Zea mays
  Coding DNA Sequence Number=SeqID_41261
MATMEATTLTALLKEAVAAFSTRRAVAVPSRLELTHVVLDALIDAVAARLAADAVFLLGHVVALSFPNTIEVVLVSAIAWVMLGLVALAFHLRPCISPVAFLSGQPRCCP

SEQ ID NO: 83041 - protein, 226 aa, Zea mays
  Coding DNA Sequence Number=SeqID_41262
MARVACTLRGKRLDGGVSVLLVGVNLICFPPYGDMPPRTRKTARKSTGPIGVSQHQLAPRHEESSNGSNDPIRDLEAQVEQLRTELRHRNGVWVEDGQRINELRADVRHLQDELAERDLAIYWAVNSRSIAWDRESKARARVEELSMVVDNLQVYYNTLHEEVHELYSRLHPDVSADPTGMGAGPSGTAGEALGGELDLFKPPSSMNLADERSPTTDSEATKDDKY

SEQ ID NO: 83042 - protein, 192 aa, Zea mays
  Coding DNA Sequence Number=SeqID_41263
MPPRTRKTARKSTGPIGVSQHQLAPRHEESSNGSNDPIRDLEAQVEQLRTELRHRNGVWVEDGQRINELRADVRHLQDELAERDLAIYWAVNSRSIAWDRESKARARVEELSMVVDNLQVYYNTLHEEVHELYSRLHPDVSADPTGMGAGPSGTAGEALGGELDLFKPPSSMNLADERSPTTDSEATKDDKY

SEQ ID NO: 83043 - protein, 193 aa, Zea mays
  Coding DNA Sequence Number=SeqID_41264
  Gene Ontology: Mol. function=methyltransferase activity; Cellular component=ribonucleoprotein complex; Biological process=metabolic process
  Homolog annotation: Hit_ID=Q33AG7; Match level="QueryCoverage=61%, HitCoverage=32%, E-value=1e-52, Identity=86%"; Hit description=CMV 1a interacting protein 1, putative, expressed
  Pfam annotation: Domain name=Methyltransf_11; Domain location=46-134; Score=36.3; E_value=1.1e-07; Accession=PF08241.2; Description =Methyltransferase domain
  Pfam annotation: Domain name=Methyltransf_12; Domain location=46-146; Score=24.4; E_value=0.00039; Accession=PF08242.2; Description =Methyltransferase domain
  Pfam module annotation: Pfam domain module=Methyltransf _11::Methyltransf_12; Domain location=46-134::46-146
MSIAKRAIPEATSIEEANQIVRGNWLNVIEEHHLKYLGSSQVNDILDIGCSVGVSTRYLVEKFPSAQAVGLDLSPYFLAVEAQKEEKLSRPKPIRWVHANGEATGLSSDSFDLVSLAYVHVVFEEQFGSGRLLAYISARPGQCGRADGYILEGKELEFYMKKLQRTGDAEDRGDDEVSGLRVAAEAWATFRRQ

SEQ ID NO: 83044 - protein, 68 aa, Zea mays
  Coding DNA Sequence Number=SeqID_41265
DDEDDGYDYAYGNGLRVAAEAWATFRRQRGLREGARGREAEPRRKERIQVYNGGVAECYVSSGGELAP

SEQ ID NO: 83045 - protein, 76 aa, Zea mays
  Coding DNA Sequence Number=SeqID_41266
MALTEIMVSKNEVEVADEDKQAQPEYLSYNIRIAVTSHRRMSLYGPVIISMSSLKTGTKNSLDLMQNLLEATCPIN

SEQ ID NO: 83046 - protein, 372 aa, Zea mays
  Coding DNA Sequence Number=SeqID_41267
  Gene Ontology: Mol. function=DNA-directed RNA polymerase activity; Cellular component=chloroplast; Biological process=transcription
  Homolog annotation: Hit_ID=Q9SYW4; Match level="QueryCoverage=53%, HitCoverage=25%, E-value=1e-104, Identity=77%"; Hit description=T7 -like RNA polymerase
MDRSKIGIWRVVAGGQAGEERQSGALLLLQHGSFRARSGLAILKRPIIGPGNRTIDMITGPYKLIRRCEVTAILILYGLPRLLTGSILAHEMVHAYLRLTGSGSMATTSDASSSSSTSSSMKKGAKTEFEKRLGEFFKHQIETDSSVAYGDGFRALHVALDILGSTKWRVNRRVHDVVETIWSQGGDIAGLVDEANVARKMREEDGFYYPHNLDFRGRACPMHPHLCHLGSYLCRGVLEYAEGRPLGKYGLCWLKIHLANKYGGGIEKLSHEGKLAFVENQLFDIFDSAANPVDGNCWWTNAEDPFQCLAACMDLSDALRSPSPYHAVSHLPIHQDGSCNGLQHYAALGRDYFCTIDCIVYRVKFEIGDEDE

SEQ ID NO: 83047 - protein, 73 aa, Zea mays
  Coding DNA Sequence Number=SeqID_41268
MTRVAHLSAPPPGGWTGRMVTNWVLQYAIQTIHFTLLKKAADVASQFIDPLAIRDPYVIPTMEFCLKVIHLSL

SEQ ID NO: 83048 - protein, 301 aa, Zea mays
  Coding DNA Sequence Number=SeqID_41269
MPLRTRKTTRKHTGPIGVPRHQLAPRHEDSRSSSNDLIGELEAQVNQLRTELRRRNNIWVADGEGINELRSDICRLQDQLADRDLALDWAVLSRSLSWAKEAKARARVEELSSAIDNLQAYCNTLHEEVHVLYSQLHPHVPADPVGTEVGPSYVAGEAFGGELDLFRPPPSMKLVDEWSPMPDSEATKSDRKQEYITFLSNDAAGTSSGRKATPNPPPVPPMLAEAIDALVNATADNTRFLREMAGQQLQQQGGRAYQQGPRETSYLDFSETRPLVFVKAEDPLEADEWIRVIEQKFGLLQ

SEQ ID NO: 83049 - protein, 498 aa, Zea mays
  Coding DNA Sequence Number=SeqID_41270
  Gene Ontology: Mol. function=O-methyltransferase activity; Biological process=lignin biosynthetic process
  Homolog annotation: Hit_ID=Q6K9X3; Match level="QueryCoverage=69%, HitCoverage=96%, E-value=1e-155, Identity=79%"; Hit description =Putative O-diphenol-O-methyl transferase
  Pfam annotation: Domain name=Dimerisation; Domain location=40-87; Score=12.8; E_value=0.0047; Accession=PF08100.2; Description =Dimerisation domain
  Pfam annotation: Domain name=Methyltransf_11; Domain location=213 -304; Score=-2.0; E_value=0.086; Accession=PF08241.2; Description =Methyltransferase domain
  Pfam annotation: Domain name=Methyltransf_2; Domain location=101-350; Score=223.9; E_value=3.6e-64; Accession=PF00891.8; Description=O -methyltransferase
  Pfam module annotation: Pfam domain module=Dimerisation::Methyltransf_ 11::Methyltransf_2; Domain location=40-87::213-304::101-350
MPPPSANGATAAAAAARDDMSPAEARLAMMELANMVSVPMALAAVIRLGVPAAVWAGGANAPMSAADLLPPGHPDPSVLERLLRLLASRGVFSESTESTPTTRRRLFALTAVGRTLVPGPASGASYADYVLQHHQDALVAAWPRLHEAVLDPAGPEPFARANAGVTAYAYYGKDQDANRVMLRAMAGVSEPFMGALLDGYGAAGGFRGVATLVDVGGSSGACLEMIMRRVPTITEGINFDLPDVVAAAPPIAGVRHVGGDMFKSIPSGDAIFMKWVLTTWTDDECTAILRNCHAALPDGGKLVACEPVVPEETDSSTRTRALLENDIFVMTTYRTQGRERSEEEFRHLGVDAAGFTAFRAIYLDPFYAVLEYTKMGIPHRSSELQACMDMQVGLFQVSDAHVNLRGYAQLESTPPSELLLHKAGTLPLLTSMIYEGCDQYKHSLPLTMTSVKVVIPHNSSIFFKHNDIARIARNFIIKMNLFVRQITSRASSSEESYL

SEQ ID NO: 83050 - protein, 56 aa, Zea mays
  Coding DNA Sequence Number=SeqID_41271
HNDIARIARNFIIKMNLFVRQITSRASSSEESYYRPRVPENRSNANKSNVDMILIP

SEQ ID NO: 83051 - protein, 115 aa, Zea mays
  Coding DNA Sequence Number=SeqID_41272
MNLFVRQITSRASSSEESYYRPRVPENRSNANKSNVDMILIPGISTSTSGRSIQTNMNIEALHYMGIPPPNAEMFQKHTDKIPNHNHPVVANGLMNTIRHLEPLVDFRSKMTIRV

SEQ ID NO: 83052 - protein, 188 aa, Zea mays
  Coding DNA Sequence Number=SeqID_41273
MNLFVRQITSRASSSEESYYRPRVPENRSNVNKSNVDIILIPVGYARPVSARLLREHAEKRSTEVARPVHRSLHARDHTYSCKDQGLHLLKAVQAAQPLMACVSAQRSKEVTHSFLLEKPDLATSPHARTRANSPPTPPTSGPTQALRAQRGRDLQRCGESESISTGDGGAMARSPTGQAGEWGARET

SEQ ID NO: 83053 - protein, 103 aa, Zea mays
  Coding DNA Sequence Number=SeqID_41274
  Homolog annotation: Hit_ID=Q1T213; Match level="QueryCoverage=82%, HitCoverage=6%, E-value=3e-17, Identity=59%"; Hit description=IMP dehydrogenase/GMP reductase
MATLTNESSEILRRRQYALLLSYLQYCSSILDSDVPPSVLWFLLLEEQDGDDEDITLQKVLKEHNELAHANISIIRKEAQAIVDLVEVTDTALLALIENFTPL

SEQ ID NO: 83054 - protein, 143 aa, Zea mays
  Coding DNA Sequence Number=SeqID_41275
  Homolog annotation: Hit_ID=P93648; Match level="QueryCoverage=26%, HitCoverage=3%, E-value=9e-12, Identity=86%"; Hit description=Lon protease homolog 2, mitochondrial precursor
MEIIAIAGYITDAKMHIARDYLEKNTRQACGIKADQLDNLRWRPRKRSRRSGSRKQSDTSSGSSSGDMDLSSPGPSGFCQLNLVPDEETCKSSGEQPFMGVPVQSRSSVMTFIKLSSTDLQLKCQVEVKETALLALIENFTPL

SEQ ID NO: 83055 - protein, 69 aa, Zea mays
  Coding DNA Sequence Number=SeqID_41276
  Gene Ontology: Mol. function=nucleoside-triphosphatase activity; Cellular component=mitochondrion; Biological process=ATP-dependent proteolysis
  Homolog annotation: Hit_ID=P93648; Match level="QueryCoverage=95%, HitCoverage=10%, E-value=2e-22, Identity=60%"; Hit description=Lon protease homolog 2, mitochondrial precursor
MEIIAIAGYITDEKMHIARDYLEKNTRQACGIKTDQIALQLVRQRVSNEPDHESVSATVTEESGSGEFY

SEQ ID NO: 83056 - protein, 209 aa, Zea mays
  Coding DNA Sequence Number=SeqID_41277
  Homolog annotation: Hit_ID=P93648; Match level="QueryCoverage=28%, HitCoverage=6%, E-value=1e-11, Identity=63%"; Hit description=Lon protease homolog 2, mitochondrial precursor
MYYHTRPEDRFDAHAAIGDDEARALMIVTALRSCQGTISELVRHSKELINLAAVELEKTKSLREQMMEIIAIAGYITDAKMHIARDYLEKNTRQACGIKADQLDNLRWRPRKRSRRSGSRKQSDTSSGSSSGDMDLSSPGPSGFCQLNLVPDEETCKSSGEQPFMGVPVQSRSSVMTYIKLSSTDLQLKCQVEVKETALLALIENFTPL

SEQ ID NO: 83057 - protein, 303 aa, Zea mays
  Coding DNA Sequence Number=SeqID_41278
  Pfam annotation: Domain name=IQ; Domain location=115-135; Score=23.2; E_value=0.00094; Accession=PF00612.17; Description=IQ calmodulin -binding motif
  Pfam annotation: Domain name=IQ; Domain location=73-93; Score=25.0; E_ value=0.00027; Accession=PF00612.17; Description=IQ calmodulin -binding motif
  Pfam module annotation: Pfam domain module=IQ::IQ; Domain location =115-135::73-93
  Subcellular localization annotation: CTP_CleavageSite=32; ConfidenceScore=5.10e-01
MDRRSMTPGIISRLSSPPPAAHPSPPPAAAPSAAATPSHPPSPTPDAFTRLEEKWDQFVVMFHRYKEKTEKELQAAVRLQAAARGFLARRQVQSLRGEKHLAVASRATPWPSSHEQALVRLQAAVRGFLVRRAVRKLHLLISSSLHQLAVCAPNHQVSSILFEPPAEVEIWVCSPPARPKRVVSFIRATALVLDRPNIRTGWFLLHLSSNVKSAVQLFPWDPGGQEDIAAVQIYILVPQLFCIFVLNNKDLNNSVGSNMMHPKSSEEEEEMGERNAAVPFKNLIQDQSLLQVHTMARLEAFKC

SEQ ID NO: 83058 - protein, 331 aa, Zea mays
  Coding DNA Sequence Number=SeqID_41279
  Gene Ontology: Mol. function=hydrolase activity; Cellular component =cytoplasmic membrane-bound vesicle; Biological process=biological _process
  Homolog annotation: Hit_ID=Q5JLP6; Match level="QueryCoverage=54%, HitCoverage=61%, E-value=5e-91, Identity=87%"; Hit description =Putative S-formylglutathione hydrolase
  Pfam annotation: Domain name=Esterase; Domain location=114-323; Score= 122.8; E_value=9.6e-34; Accession=PF00756.11; Description=Putative esterase
  Pfam annotation: Domain name=Peptidase_S9; Domain location=125-328; Score=-66.3; E_value=0.0059; Accession=PF00326.11; Description =Prolyl oligopeptidase family
  Pfam module annotation: Pfam domain module=Esterase::Peptidase_S9; Domain location=114-323::125-328
MKETTLFGRAGGLHTQISTSAGGSKSIDETWWLGAQAAIWCSDELISKCSFRTARLTRKPRTAACRRTTACSCDDGHGVALEATTRVVEGGWEGVAAADGAAAGGGEGWAAGGGEDNLELIPGVMDLRSMGIAVFSGEEEKGICTLIIASAGFYLNATNEKWKNWRMYDYIVKELPKVLSDNFEQLNTSQASIFGHSMGGHGALTIYLKNTDKYKSVSAFAPIANPINCPWGQKAFSNYLGSTKSDWEEYDATCLIKKNSKVPTTILIDQGEADKFLAEQQLLPHKFEEACKAAGAALTLRMQPGYDHSYYFIATFVDDHIAHHAQFLKSA

SEQ ID NO: 83059 - protein, 695 aa, Zea mays
  Coding DNA Sequence Number=SeqID_41280
MGTCAAPGGRMSSPELRESSARMLEVTGGRWPKNLPIPWAEGEDMSTSRIARGLRIFPYGQNIAAVVSAVMNKDHQDAAQKRRAVIRIAEPRREAKKARGSVKAAAPSSSKPTTAAKPAAPGSSKASASAKTAVAGGTKPPPCEAAKGWELPFAGETVGEGQLVVVPPAVATTASTAVVGVKGASRDPWATFCASGEIPSAAAAKDVAGSMSWLSQQLREVSQQLSQAAEFADRVASGALTADVAAEVERLQAQHADAVREKSAAESKNRRLAEKVAALEADKTDLRRQLAAQAEAKVARAEGSLASKRAEEWEARFNALRGRMDKAEASTRSEVERTLAQLVDSYRELGARTADFEVPVREADLHFLEWLQEELLVLPTIVEGFMSFASLVTCEGAMNALSREGYRHYEVFDQSDENFECEIFKAEDPVVKQSAGALFDRMWGAHGREAMERAEDVDDLGDLAGAPPEAAEVNPVLPSDAGEGPSAVPVPTVAGKDPVSAPAPTVEDALKVVAEPAVEDPTAAAGPSQGFGPAHATATDNANFVAASTLVAEDDSDDSVSKFFESDDSGSSVVWTEEFSDEDLDYFAALDVAAAEASPRVMGAEALPGASAGRRRRRAVAKRRVSEVSRSDRRHCGEVEGGRLRVDGAGKRELLSSPAGASLGEGELRNLFEGEELRMMLFNYKEMGIIPKVEP

SEQ ID NO: 83060 - protein, 537 aa, Zea mays
  Coding DNA Sequence Number=SeqID_41281
VGEGNWLLSHCGGNHGVTAVVGVKGASRDPWATFCASGEIPSAAAAKDVAGSMSWLSQQLREVSQQLSQAAEFADRVASGALTADVAAEVERLQAQHADAVREKSAAESKNRRLAEKVAALEADKTDLRRQLAAQAEAKVARAEGSLASKRAEEWEARFNALRGRMDKAEASTRSEVERTLAQLVDSYRELGARTADFEVPVREADLHFLEWLQEELLVLPTIVEGFMSFASLVTCEGAMNALSREGYRHYEVFDQSDENFECEIFKAEDPVVKQSAGALFDRMWGAHGREAMERAEDVDDLGDLAGAPPEAAEVNPVLPSDAGEGPSAVPVPTVAGKDPVSAPAPTVEDALKVVAEPAVEDPTAAAGPSQGFGPAHATATDNANFVAASTLVAEDDSDDSVSKFFESDDSGSSVVWTEEFSDEDLDYFAALDVAAAEASPRVMGAEALPGASAGRRRRRAVAKRRVSEVSRSDRRHCGEVEGGRLRVDGAGKRELLSSPAGASLGEGELRNLFEGEELRMMLFNYKEMGIIPKVEP

SEQ ID NO: 83061 - protein, 167 aa, Zea mays
  Coding DNA Sequence Number=SeqID_41282
MQGRMKKAESALDRPLALCRGSGAALANPAPAKPLTASAYQPENSGPDHAPGQRLVRMREQPDRVRLTAAKSSLGRHRNLRLARPQGSGSTSTRKTISASPDPRAQTRPRPPDDGLRLARPQGSDSTSTSRRRSSPRPTPGLGLNLDSGRRSPPRPTPGLGLNLDLG

SEQ ID NO: 83062 - protein, 379 aa, Zea mays
  Coding DNA Sequence Number=SeqID_41283
  Homolog annotation: Hit_ID=Q6QP51; Match level="QueryCoverage=43%, HitCoverage=73%, E-value=8e-15, Identity=43%"; Hit description =Putative growth-regulating factor 1
MQAACDYTKGAHPFDFDASSVEAQAHTSCNRRAGYYVQKTAVPPAPAPRLLDYGTSAATRGNPAHGPAVPTRHARHESVSRGRRRDGIGKGDTPKGILLREGSGPRAPLLIRGSKAGPSEGFESRLRALGLRAHYWSEVRRLAPRKGSTAASGHSGSAPTTDQGFIGWPLDGFDSRPRARRVRDDSGVRLTAAKSSLGRHRNLRLAPTPGLGLNLDSEDDLRLARPQGSDSTSTSGRWSPPRPTPGLGLDLDLQTTVFASPDPRARTQPRLRTTVSASPDPRARAQPRPRMSHHLTRADHATRGGIITLPLASPSYKEQDRRPIWLAPVKQVMMAPRVLHDNGGSQPLTEARRRQQGSDSPDSCASTGLKCSSEGPDTT

SEQ ID NO: 83063 - protein, 296 aa, Zea mays
  Coding DNA Sequence Number=SeqID_41284
  Subcellular localization annotation: CTP_CleavageSite=41; ConfidenceScore=5.68e-01
MSSHSPHASRPSTFRAPGWGAPALLSSCRRWRNATSRKLVPFSHRSASRIFIRRPGCIPSPMVTQDGDHQFDGGEKQAGLRPLPRPQLQGSSSSLLGRRARRAGALPPARVGGPPLLPASGGGNHPPALRRRRPPAMPGKANCCCPARVQHYVLCPRFCREDGSEDLPVRFGAAGARWCGVGGQVDAAVGAEVVADGESFSVDETVSATRGPTSDSLALMSGSRPLSGDANESLPAAASIPGLSLLPQRSLASRPEIAVLQALRCGGCSYPREWNRSSVCNGTLSAGVLFIAAVEV

SEQ ID NO: 83064 - protein, 301 aa, Zea mays
  Coding DNA Sequence Number=SeqID_41285
  Homolog annotation: Hit_ID=Q6QP51; Match level="QueryCoverage=77%, HitCoverage=90%, E-value=4e-18, Identity=39%"; Hit description =Putative growth-regulating factor 1
MWALPIRGLGRWKGAMHEESAKGRRHLWQARRAMLHLRHNDRVKKGTGKGDTPKGILLCEGRGPRALIRGSKAGPSEGFDRRLRALGLRAHYWSKVRRLAPRMGSTAASGHSGSMPTTDQGFEGWPPKGFDSRLRTRRARDDSGYVRYMAEARATLPRGSGAALANPAPTKPLKASTYQPENSEPDYAPGLRPENSAACAAPTIMPPAKVRLTAAKSGLRRHRKLRLARPQGSDSTSTSNDDLRLARPQGSDSTSTSDDGLRLARPPGSDSTSTSDGLRLARPQGSDSTSTSDDGLCLARP

SEQ ID NO: 83065 - protein, 266 aa, Zea mays
  Coding DNA Sequence Number=SeqID_41286
  Gene Ontology: Mol. function=kinase activity; Cellular component =ornithine carbamoyltransferase complex; Biological process=amino acid metabolic process
  Homolog annotation: Hit_ID=Q6QP54; Match level="QueryCoverage=66%, HitCoverage=49%, E-value=4e-14, Identity=47%"; Hit description =Putative kinase
MTLGTSDTWPRLGLRSRGTLGHFRDPQERFCNGIPSKGGIEPSDPIKWDRVRQITSRARTLPRLWKTVSASPDPRAQTLPRLRKTVSASPDPRARTQPRLRKTVSASSDPRARTLPQLRTTVSASPDPRAQTLPRLRTTVSASPDPRARTLPRPRTTVSASPDPRARAQPRPRRSHLLARPRARTDHVTGEPIITLPLASSGYGEQDRRPIWLAPVKQVMMAPRVLHDDDSSQPLTEARRRQQGPDSSDSCAPAGLRRSSNGHDIT

SEQ ID NO: 83066 - protein, 258 aa, Zea mays
  Coding DNA Sequence Number=SeqID_41287
MGQLQPACYGWGGGRCGERGQRLARAGGERVSRRGRENGGSTRSRGSAGAADEIDEGARGRGRSTVECGFRESRGSHRLPFMEIVGESGSKEYSLIPVQTFRSPAPQRTERDQKKQKHGYLYLAGPMAGGVGGTREEAGGVEKRAQAVECYADHYRRGDAGPPRQRAWTGGGEGEGEGGAIDAAARLAGVGGRRRCRVRDVVISGGGGWSRVVRVVVDVLLGLLRNSKDSSCFSQPQSNQTNTKIIFSGLCKIEDAEL

SEQ ID NO: 83067 - protein, 140 aa, Zea mays
  Coding DNA Sequence Number=SeqID_41288
MGQLQPACYGWGGGRCGERGQRLARAGGERVSRRGRENGGSTRSRGSAGAADEIDEGARGRGRSTVECGFRESRGSHRLPFMEIVGESGSKEYSLIPVQTFRSPAPQRTERDQKKQKHGYCTWRGQWLAESGARGKRPVG

SEQ ID NO: 83068 - protein, 52 aa, Zea mays
  Coding DNA Sequence Number=SeqID_41289
MARVVCTLYGKRLDGGVSVLSVRTQQIFVAFVPRWCLRKKTRTEASGGCVLL

SEQ ID NO: 83069 - protein, 241 aa, Zea mays
  Coding DNA Sequence Number=SeqID_41290
MARVVCTLHGKRLDGGVSVLSVRKQQIFVAFVPRWCLKRKIKTEASGGNKPPCTRKTARKSTRPIGVPRHQLAPRHEDSSSGNNDPIGDLEAQVEQLRTELCHRNSVWVEDGQRINELRTDFRHLQDELVERDLALDWAVNSRSIAWDREAKARARVEELSTAVDNLQVYCNTLHEEVHDLYSRLHPDVPADPVGMGAGPSGIAGKAFGGELDLFKPPPSMNLADEWTPTPDNKAAKDNKY

SEQ ID NO: 83070 - protein, 130 aa, Zea mays
  Coding DNA Sequence Number=SeqID_41291
MGTSCSANPAHEQRESWRAAEGEAPALGDSRGAAPLSSAMAAAGGGAAGCCWPESRRRTGLLLARRNDGWSGKLSCEMFWAPWLLVLLPADCRGEEEELPALACVKKSGGWENGRGGKRLWRLGKFEGWE

SEQ ID NO: 83071 - protein, 171 aa, Zea mays
  Coding DNA Sequence Number=SeqID_41292
MTKPRAYYGAHMVELLGTRCHLFRGVFFPSAQTPPWPSTALELFSPMAASSPLQLLDAHCSFSLAQQQPTPLFFLPSLHGNQQGARPAAMAPRKSHSRAPQTGCLFSQRLPPLAPPRRTHQRGARHRPSSSLCSLSQGRSRSSSLPPSEPPSSALPAPWLKPELTPWRSDP

SEQ ID NO: 83072 - protein, 360 aa, Zea mays
  Coding DNA Sequence Number=SeqID_41293
  Homolog annotation: Hit_ID=Q9FLU4; Match level="QueryCoverage=58%, HitCoverage=87%, E-value=3e-45, Identity=48%"; Hit description =Arabidopsis thaliana genomic DNA, chromosome 5, TAC clone:K18P6
  Pfam annotation: Domain name=DUF599; Domain location=11-226; Score =262.5; E_value=8.8e-76; Accession=PF04654.3; Description=Protein of unknown function, DUF599
MQRGSSSQLDYVLVPLGLAVMVGYHVWLLLRIRSRPETTVIGINAVNRRIWVRHIMEDPSGKHAVLAVQTLRNTIMASTVLASVAITLSSLVAALMASGAAAHGGLLLSAPGGGSEAALAAKFLAVLVCFLVAFLLNVQSIRYYSHTGLLVNVPLAAHRRPARAVGYVTAALNRGFYFWSLGVRAYYFSCPVFLWLFGPVPMCASCVAMVAALYFLDVNKEWEDKDDDGSEDEADGDGRSTATTGPGTRDGVAAKSDLISFLLWAPLLLLLNTLDFPKSLLVLSKSIHCIYRSDVLITFRHSAWLGGAWAFVALGVCLLPMIGIVDPSSLVENWSFLAWALLGKSGVLVPCVELSNNDSG

SEQ ID NO: 83073 - protein, 248 aa, Zea mays
  Coding DNA Sequence Number=SeqID_41294
  Homolog annotation: Hit_ID=Q9FLU4; Match level="QueryCoverage=84%, HitCoverage=87%, E-value=2e-45, Identity=48%"; Hit description =Arabidopsis thaliana genomic DNA, chromosome 5, TAC clone:K18P6
  Pfam annotation: Domain name=DUF599; Domain location=11-226; Score =262.5; E_value=8.8e-76; Accession=PF04654.3; Description=Protein of unknown function, DUF599
MQRGSSSQLDYVLVPLGLAVMVGYHVWLLLRIRSRPETTVIGINAVNRRIWVRHIMEDPSGKHAVLAVQTLRNTIMASTVLASVAITLSSLVAALMASGAAAHGGLLLSAPGGGSEAALAAKFLAVLVCFLVAFLLNVQSIRYYSHTGLLVNVPLAAHRRPARAVGYVTAALNRGFYFWSLGVRAYYFSCPVFLWLFGPVPMCASCVAMVAALYFLDVNKEWEDKDDDGSEDEADGDGRSTATVCGGV

SEQ ID NO: 83074 - protein, 161 aa, Zea mays
  Coding DNA Sequence Number=SeqID_41295
  Gene Ontology: Mol. function=protein-tyrosine kinase activity; Biological process=protein amino acid phosphorylation
  Homolog annotation: Hit_ID=Q9LDG0; Match level="QueryCoverage=93%, HitCoverage=23%, E-value=7e-29, Identity=49%"; Hit description =Putative receptor-like kinase
MLQMVDLCFNGFDGTIPSELANLTHLVALDLFNNLLFVRIPDLGLPALRFLNLSNKCLDGTVLVSLLRFTDTAFVGNNLTSPTLAPPSLYLLASPRLTLRGGGLGSVRRARLSEAVILAITVGGCVIGFAVAALLLLAFCNSTREGCTTDASSTRAAGRFL

SEQ ID NO: 83075 - protein, 186 aa, Zea mays
  Coding DNA Sequence Number=SeqID_41296
  Gene Ontology: Mol. function=receptor activity; Biological process =protein amino acid phosphorylation
  Homolog annotation: Hit_ID=Q9ATW3; Match level="QueryCoverage=80%, HitCoverage=88%, E-value=8e-37, Identity=56%"; Hit description =Receptor-like kinase
MLQMVDLCFNGFDGTIPSELANLTHLVALDLFNNLLFVRIPDLGLPALRFLNLSNKCLDGTVLVSLLRFTDTAFVGNNLTSPTLAPPSLYLLASPRLTLRGGGLGSVRRARLSEAVILAITVGGCVIGFAVAALLLLAFCNSTREGCTTDASSTRAAGSLSLIVVHSDLWLIAIAFFDGVRLNAND

SEQ ID NO: 83076 - protein, 100 aa, Zea mays
  Coding DNA Sequence Number=SeqID_41297
MGKWLINLDQALSRQSRPSVLIKDRTVDWPVVVETLQLATYPGMGQDPWDDEFGLMNSIALLSYPVHVHSHLRPLMARIGACGPDNLGGLSQRGIGAIPH

SEQ ID NO: 83077 - protein, 98 aa, Zea mays
  Coding DNA Sequence Number=SeqID_41298
MGKWLINLDQALSRQSRPSVLIKDRTVDWPVVVETLQLATYPGMGQDPWDDEFGLMNSIALLSYPVHVHSHLRPLMARIGACGPDNLGGLSQKLTRSK

SEQ ID NO: 83078 - protein, 71 aa, Zea mays
  Coding DNA Sequence Number=SeqID_41299
MGDPVSGRMRDKVRARLHSEITTLVVYDLLELNKVNFTYVRPLGGILSKLGQTLSKGRRDALNYNYYLTVL

SEQ ID NO: 83079 - protein, 178 aa, Zea mays
  Coding DNA Sequence Number=SeqID_41300
MRKWARPSPLLLMLLSCRSNIPLDRPTRWQGGRPSHTINQILHGTCKNGATSKAEYTNTQLDLTGGTPTPHKTTVPIDSPFASRPHRLGIQCSTDPGCRCAVTALVPTIASMGDPVSGRMRDKVRARLHSDCNLADGEYVLIPEQGPVQEEDQEQASEAAIEDLPAAPAIEGKPRFYA

SEQ ID NO: 83080 - protein, 73 aa, Zea mays
  Coding DNA Sequence Number=SeqID_41301
MTAVGVSGALYAKAVRPGRERGIDGDGCHVWGRSTLTCRTMQDVVDGVTWPTTLPPGWTVEWDVAPAGEEHEE

SEQ ID NO: 83081 - protein, 61 aa, Zea mays
  Coding DNA Sequence Number=SeqID_41302
MAVRPGRERGIDGDGCHVWGRSTLTCRTIQEMVDSVTWPTTLPPGWTVEWDVAPTGEEHEE

SEQ ID NO: 83082 - protein, 1048 aa, Zea mays
  Coding DNA Sequence Number=SeqID_41303
  Gene Ontology: Mol. function=binding; Cellular component=nuclear pore; Biological process=protein import into nucleus, docking
  Homolog annotation: Hit_ID=Q84NP8; Match level="QueryCoverage=95%, HitCoverage=95%, E-value=0.0, Identity=76%"; Hit description =Putative Ran binding protein 11-like
  Pfam annotation: Domain name=HEAT; Domain location=559-595; Score =21.3; E_value=0.0035; Accession=PF02985.12; Description=HEAT repeat
  Pfam annotation: Domain name=IBN_N; Domain location=34-102; Score =33.0; E_value=1e-06; Accession=PF03810.9; Description=Importin-beta N-terminal domain
  Pfam module annotation: Pfam domain module=HEAT::IBN_N; Domain location=559-595::34-102
MPLPALSHRFLVSSRAWLLATGCPIYGASASAPTDLFITRFSASQEIISARGLACREDVRLLATVYFKNSINRYWRHRRDSYGISNEEKDHLRKNLLLNMREENSQIALQLAVLISKIARLDYPKEWPELLSVLAQQLQSADVLASHRVFMVLFRTLKELSTKRLAVDQKNYAEITGHLFEYTWNLWKSDVQTILQNLSMLSQRNDIDSVFEQSNDLALICDRWLLCLMIVRLLIFSGYASDSRTAQEVWQVREVCPTVLTAIKSLLPYYDTFKDKHAKLCDFAKRACTKLMKVLVTLQGRHPYSFVHETVLSATVDFCLNMITNPEQTGTTFEEFLIQSMVLVKSVLECKEYRPSPMGRVINENEPLSLEQRKKNFAAVASDMLKVILSGDRVVLLCNILVRRIFLAFKYLRSLQLFCRYFIFTAKDLEEWSENPESFHHEQNLVQWTEKKRPCAEALFIVIFEKYRELLAPVVVSVLREAMAISPPQETEVTAGMLLKDASYTAAGHVYYELSNYLSFNEWFHGSLSIEISNHHPNMRIIRRKIALLLGHWISEIKGDTRKLVYRALVGLLQDNDIAVRLAACSSLCYLFQESCFSELDLFECLPTCWTMSFKLIEDVQEFDSKVQVLNFISVLLEHAGDKVIPFACQLSQFFQMIWNESAGESLLQIQLLTALRTFVSSLGFQSPLSYHMLIPILQSGINIDSPDALNLLEDSVLLWEATLSNAPSIVPQLLDLFPYLVGIMNRSFDHLEVTMKIIEDYIIFGGSEFLKSHGASLANIIDTIVGNVNDKGLLTALPIVDLLIQVIRASPIVLEKLIGKSIFPLEAPPLISSALQKLTFISLSQDDGQNPSRTTVRASSGAILARLLVMNTNFSAQLLSEPALLASIQQAGISVNNNLLFSLVDMWIDKVDDANAIQQKEYAMALSVILTLQVPQVIDKLDDILSVCTTVIIGSREVKTDDDTSGDITSSSWIGNDGSGYSNTSSKELRKRQVKDSDPIKQTSLEMVLRENLKACAVFHGDAAFNAAIGRIHPSSFAQLQQALNTA

SEQ ID NO: 83083 - protein, 778 aa, Zea mays
  Coding DNA Sequence Number=SeqID_41304
  Gene Ontology: Mol. function=binding; Cellular component=nuclear pore; Biological process=protein import into nucleus, docking
  Homolog annotation: Hit_ID=Q84NP8; Match level="QueryCoverage=99%, HitCoverage=74%, E-value=0.0, Identity=78%"; Hit description =Putative Ran binding protein 11-like
  Pfam annotation: Domain name=HEAT; Domain location=289-325; Score =21.3; E_value=0.0035; Accession=PF02985.12; Description=HEAT repeat
DTFKDKHAKLCDFAKRACTKLMKVLVTLQGRHPYSFVHETVLSATVDFCLNMITNPEQTGTTFEEFLIQSMVLVKSVLECKEYRPSPMGRVINENEPLSLEQRKKNFAAVASDMLKVILSGDRVVLLCNILVRRIFLAFKYLRSLQLFCRYFIFTAKDLEEWSENPESFHHEQNLVQWTEKKRPCAEALFIVIFEKYRELLAPVVVSVLREAMAISPPQETEVTAGMLLKDASYTAAGHVYYELSNYLSFNEWFHGSLSIEISNHHPNMRIIRRKIALLLGHWISEIKGDTRKLVYRALVGLLQDNDIAVRLAACSSLCYLFQESCFSELDLFECLPTCWTMSFKLIEDVQEFDSKVQVLNFISVLLEHAGDKVIPFACQLSQFFQMIWNESAGESLLQIQLLTALRTFVSSLGFQSPLSYHMLIPILQSGINIDSPDALNLLEDSVLLWEATLSNAPSIVPQLLDLFPYLVGIMNRSFDHLEVTMKIIEDYIIFGGSEFLKSHGASLANIIDTIVGNVNDKGLLTALPIVDLLIQVIRASPIVLEKLIGKSIFPLEAPPLISSALQKLTFISLSQDDGQNPSRTTVRASSGAILARLLVMNTNFSAQLLSEPALLASIQQAGISVNNNLLFSLVDMWIDKVDDANAIQQKEYAMALSVILTLQVPQVIDKLDDILSVCTTVIIGSREVKTDDDTSGDITSSSWIGNDGSGYSNTSSKELRKRQVKDSDPIKQTSLEMVLRENLKACAVFHGDAAFNAAIGRIHPSSFAQLQQALNTA

SEQ ID NO: 83084 - protein, 118 aa, Zea mays
  Coding DNA Sequence Number=SeqID_41305
MEAKSHHQPNQGGTCKNYATSKAEYTNTQLDLPVTALVPTISRMGDPVSGRMRDKVRARLHSDLGAVGAPDMSGAHRTVRCPIPTVGSATCRAPIARPTVGPADRWLTGQSGAHRTVR

SEQ ID NO: 83085 - protein, 196 aa, Zea mays
  Coding DNA Sequence Number=SeqID_41306
MEAKSHHQPNQGGTCKNYATSKAEYTNTQLDLPVTALVPTISRMGDPVSGRMRDKVRARLHSEHHDITIKSLISFKHTHIRPGPTCHWLKEVFFLLGFSREQQEDAAGCVPGRCAAGMRRHGREGRAAALGCRVEEGESTGRLDHGEEKHLIELGALAASVEVAMDAWGRRRDDRGAMGDAGGEVVEGRGCCAACL

SEQ ID NO: 83086 - protein, 124 aa, Zea mays
  Coding DNA Sequence Number=SeqID_41307
MTKTHTHIRPGPTCHWLKEVFFLLGFSREQQEDAAGCVPGRCVAGMRRQGREGRAAALGCRVEEGESTGRLDHGEEKHLLELGALAASVEVAMDAWGRRRDDRGAMGDAGGEVVEGRGCCAACL

SEQ ID NO: 83087 - protein, 119 aa, Zea mays
  Coding DNA Sequence Number=SeqID_41308
MGGSLLPCAMEGAAGASLAGRLDHGEEKHLLELGALAASVEVAMDAWGKKKRWWGRHGRCRGRLLLMTLCCWRGTPGRRPWEELDWRPPDAQGVGVGGEDAGGAAFEAPAGDLGRHGWE

SEQ ID NO: 83088 - protein, 125 aa, Zea mays
  Coding DNA Sequence Number=SeqID_41309
  Homolog annotation: Hit_ID=Q9FMR7; Match level="QueryCoverage=26%, HitCoverage=6%, E-value=4e-08, Identity=72%"; Hit description =Arabidopsis thaliana genomic DNA, chromosome 5, P1 clone:MWD9
MEEPKPNKGHLAWADAFVITADSISMLSEACSTGLIPKNVASLFMNKDSLKVEADTRLGELIKERLRQECLRKGTELAHGVADALFVVSPTEDLDGPIVHLPPPAVRLPREKHLGAGTSLPGFQD

SEQ ID NO: 83089 - protein, 469 aa, Zea mays
  Coding DNA Sequence Number=SeqID_41310
  Homolog annotation: Hit_ID=Q9FMR7; Match level="QueryCoverage=60%, HitCoverage=57%, E-value=1e-109, Identity=63%"; Hit description =Arabidopsis thaliana genomic DNA, chromosome 5, P1 clone:MWD9
  Pfam annotation: Domain name=DUF1022; Domain location=140-463; Score =484.7; E_value=1.1e-142; Accession=PF06258.2; Description=Protein of unknown function (DUF1022)
MQFGGLSVESGDVVGVESRGGLGCERRMTEDEALRGGHLGGQSSAHGMLVLQGEGRGALALLRGSHDGLDGGWRGVGEGLEAGDVGGPPTSSSLRGSWRAKPAREGPTLRPAREGLALRPATAKEAATREGARPVVERVGRATAVAVVALGPVGAAVVVAPGSLPTLCSRNLDFLSLGHTPKNGKREGPTLVVACGWDTISYSSLIRKVASDNVFVIQIQHPRSRLDRFDLVVTPRHDYYALTASGQQEVPHLFRRWITPQEPPRSNVVLTVGALHQADSAALRLAAIAWHDELAPLPKPLLIVSIGGPTRNCKYGVDLARQLITSLYNVLDSCGSVRISFSPRTPWKVADTIFKEFAGHPKVYIWNGEEPNPHMGHLAWADAFVITADSISMLSEAGSTGKPVYVIGTEHCKWKFSAFHKTLRERGVVRPFTGLEDISNSWSYPPLNDAIEVATRVREVIAERGWTVG

SEQ ID NO: 83090 - protein, 905 aa, Zea mays
  Coding DNA Sequence Number=SeqID_41311
  Homolog annotation: Hit_ID=Q7XIR1; Match level="QueryCoverage=16%, HitCoverage=38%, E-value=6e-53, Identity=70%"; Hit description =Carbonyl reductase-like protein
MSLDTKLILNAISELFDKFDARWSMRDAARETSRRVPVPTQCTVVGADVVADNWGNLFDSAVDSDEQRYEEPINADNWGGFFDGADASANAEFVGHWDNPSSNPDATAYVTPEVAVESVHPAARGRFFNDDSGAPLDSDDDSSVHGGHGSVMSHLLEREADTAFLPHSDQRDGVEAWFILRRCTPASFNVASTDPNNEVSSAVTADALAKAAPALFASRAPRPSLKYLELLLPAEIDFDHIDLPTAAAAGHIVAQVTGNNAVSVVEDQLRCTLLLTRNFLSSHHQAVSKEWDMVAVVHPVCNLGEKVDAICTGQIEHLLLQHLKPSPTSIGAKAVFDEMQQSTNSATTTPASSALTTTTTTTMAAPATWLDAQPAVSTCSSASSAQEDTPIPLLFLRGGLGMMDNVLPANSTFLSTNISLSSMECLREFMLHLKLGTARFTICDESVVNLWSSPVERVVQQQTWLQLELTNSGLDLWPISWQSQQVYFGTHHGFAAWPRSHGTILVFDFSNTLSWNNSMSIAASCSTNTLFAKDDGDSMNRASQLLTPWTPPMTLCLVGDDLLVMLVIPRVCRSLHMINKFSKQYFVGLSLLITREKFMSGRIMLALLPLLKLFTSGGARIVNASSLASELKRMPNEKLRNDLSNIDIWDEDRIQAVLNTFLEDLRSGRLEEAGWPVMLPAYSLSKMVINLYTRIIARRYPEMRINCVRPGFVTTDISWNLGVLTPKQGARGPVMLALLPDDGPTGWYRDEMGDKMGSLLFFKMVKYSSLVEGFCGVQFSFPNIQLCKSWSQELATNTESHLLPEMLEAANGYICHELHLMLTSIGVTHMIDCVKYLIGVIDLLTPWDPGIVVFNLKFLMLWLEGKPNLKKGGIRYSILPVIFPTSSPVSSSTPAVYLPPLLLFG

SEQ ID NO: 83091 - protein, 146 aa, Zea mays
  Coding DNA Sequence Number=SeqID_41312
  Gene Ontology: Mol. function=microtubule motor activity; Cellular component=microtubule associated complex; Biological process =microtubule-based movement
  Homolog annotation: Hit_ID=Q2R2P7; Match level="QueryCoverage=62%, HitCoverage=14%, E-value=2e-37, Identity=86%"; Hit description =Centromeric protein E, putative, expressed
  Pfam annotation: Domain name=Kinesin; Domain location=4-132; Score= -130.3; E_value=4.2e-06; Accession=PF00225.13; Description=Kinesin motor domain
MGDFQRGKSTAFLALKARRHFGETNMNMRSSRSHTIFRMVIESSGKDQTDGGDAIRVSVLNLVDLAGSERIIKTGAEGVRLNEGKYINKSLMILGNVINKLSENGKQSTSGISQKGRIDAVVRDVSRSHQVADSKQPLFICEKGLP

SEQ ID NO: 83092 - protein, 290 aa, Zea mays
  Coding DNA Sequence Number=SeqID_41313
  Homolog annotation: Hit_ID=Q2R2P7; Match level="QueryCoverage=34%, HitCoverage=23%, E-value=1e-26, Identity=51%"; Hit description =Centromeric protein E, putative, expressed
  Pfam annotation: Domain name=Kinesin; Domain location=1-171; Score= -144.0; E_value=2.9e-05; Accession=PF00225.13; Description=Kinesin motor domain
MNSSDADPVIIPRAVRDVFDTVRQADDREFLIRVSYMEIYNEEINDLLTLEGQKLKIHESLDVIESSGKDQTDGGDVIRISVLNLVDLAGSERIIKTGATRDAKILRMNFIIDLLSYEDNSCRCDIPANIQQRLINIAKRIILMYGCQHICLLLKIAHVVSAILNFSENCTPEILTPYLDGIVNKLLVLLQNGKQMVHMGALTALASVADSSQGDHAVAVAETWGSRLLRSWESNPSTTPYSVPLATGPPCPQWRCPARRLGIWGSIGEASWLPRKQGCDQRAGRCWGAA

SEQ ID NO: 83093 - protein, 285 aa, Zea mays
  Coding DNA Sequence Number=SeqID_41314
MPNCSGDGLRADAAATMPSPMSPLKGRGQAIKAKELEARSADGGGDPVGDEDFFIRHHPSADDGSHLPTGRSPLGSSRTSGAPTSAQRRRTGAKAGQPQNTNAALAARDVLGGPPVPTSAKLCSSNDKAEEPQVFPIRGLGRWKDAMHKGSAKTWLPFKGVTLLLKATLPTCVLSHSGLSLLQDAPRSTPYDTGAGSHASCKLAQGRKKPNRRARCAQLPSGYEHSSTSAQASGRKGGPPCRRHATTPRGRTLSVGLRGGYTSAKQNFQPHNTKNYCGYRSWDYH

SEQ ID NO: 83094 - protein, 181 aa, Zea mays
  Coding DNA Sequence Number=SeqID_41315
  Homolog annotation: Hit_ID=Q6QP51; Match level="QueryCoverage=65%, HitCoverage=60%, E-value=3e-16, Identity=54%"; Hit description =Putative growth-regulating factor 1
MVEKGHGSRGGTTVTLSAITKQKRWRRSGQGTGKGDTPKGILLREGSGPRALLLIRGSKAGPSEGFDSRLRALGLRAHYWSEVRRLAPRKGSTAASGHSGSARTTDQGFVGWPPKGSTAASEHAERGMTLGSGAALANPAPAKPLTASTYQPENSEPGYAPGLQPVRIREQPDRPRHHERH

SEQ ID NO: 83095 - protein, 94 aa, Zea mays
  Coding DNA Sequence Number=SeqID_41316
MTTHAGAEKTDGRGVSGGRKEAQRRAQGAITHVGGRTYVRQKREAAGGAGSSARKEGTGAGSSTRKEGMAKESAHKEGMAKESARKEGMTKESD

SEQ ID NO: 83096 - protein, 240 aa, Zea mays
  Coding DNA Sequence Number=SeqID_41317
  Pfam annotation: Domain name=IQ; Domain location=158-178; Score=23.3; E_value=0.00086; Accession=PF00612.17; Description=IQ calmodulin -binding motif
  Pfam annotation: Domain name=IQ; Domain location=200-220; Score=19.7; E_value=0.011; Accession=PF00612.17; Description=IQ calmodulin -binding motif
  Pfam module annotation: Pfam domain module=IQ::IQ; Domain location =158-178::200-220
MWGRTYARQKREAAGGAGSSARKEGTGAGSSTRKEGMAKESTRKEGMAKESARKEGMAKEKPSLRQRGITSPEKTAIPMDRRSMTPGISSRLSSPPQAAHPSPPPVAVPSAAATPSHPPSPTPDAFTRLEESFGRFAEQWDQFVVMFHRYKEKTEKELQAAVQLQTAARGFLARRQVQSLRGEKHLAVASRATPWPSSHEQVVARLQAAVRGFLVRRAVRKLHLLISSSLHQLAACAPNH

SEQ ID NO: 83097 - protein, 59 aa, Zea mays
  Coding DNA Sequence Number=SeqID_41318
  Gene Ontology: Mol. function=ATP binding
  Homolog annotation: Hit_ID=Q02028; Match level="QueryCoverage=96%, HitCoverage=8%, E-value=1e-15, Identity=72%"; Hit description =Stromal 70 kDa heat shock-related protein, chloroplast precursor
MPMDTFVKKVTELNRKMNEVDEESKQVSYPVIRDDNGNDKLDCPTLGKQFAAEEISAQV

SEQ ID NO: 83098 - protein, 132 aa, Zea mays
  Coding DNA Sequence Number=SeqID_41319
  Homolog annotation: Hit_ID=Q02028; Match level="QueryCoverage=47%, HitCoverage=8%, E-value=1e-14, Identity=68%"; Hit description =Stromal 70 kDa heat shock-related protein, chloroplast precursor
MPMDTFVKKVTELNRKMNEVDEESKQVSYPVIRDDNGNDKLDFPALGKQFAAEEISAQLNLYLVLLPLDGQSVPKLEKPYHSCLPTLSIRHLCQAHAILLDPCALVLEYLQRDIICFLHILEYVWYPMVSMK

SEQ ID NO: 83099 - protein, 145 aa, Zea mays
  Coding DNA Sequence Number=SeqID_41320
MEANTFSTCQLKVDISLNFLFMMEDLKYLKISVSKECQEFLGLVNKELNKEVQELLRLTLSKSQVKLTEYTILKGPLWTLKARIHLMARAILLDPCALVLEYLQRDIICFLHILEFSFANSYSISWDFMFGMCTLISAHMALQMK

SEQ ID NO: 83100 - protein, 245 aa, Zea mays
  Coding DNA Sequence Number=SeqID_41321
  Homolog annotation: Hit_ID=Q6YY75; Match level="QueryCoverage=23%, HitCoverage=14%, E-value=3e-13, Identity=68%"; Hit description =Serine/threonine-protein kinase Nek4-like
MDPNMQARSVQVEWVGARESLIFSAFCRSAPVSNLMLNRKMNKVDEESKQVSYPVIRDDNGNDKLDFPALGKQFAAEEISAQLNLYLVLLPLDGQSVPKLEKPYHSCLPTLSIRHLCQAPCYSIGPLCSGSGISTERHYLLPSHFRVCSVPNGVDEVIPSQLCPSQRKDSCDTTITEESSPISTLKLAHTENAPAEWDYLNIEANTLESLELRAKLLEQERLDELTSALRPFGEGAVSSREMDRR

SEQ ID NO: 83101 - protein, 378 aa, Zea mays
  Coding DNA Sequence Number=SeqID_41322
  Gene Ontology: Mol. function=transporter activity; Cellular component= intracellular; Biological process=transport
  Homolog annotation: Hit_ID=Q7F8U2; Match level="QueryCoverage=36%, HitCoverage=23%, E-value=3e-71, Identity=93%"; Hit description =Putative phosphatidylinositol-phosphatidylcholine transfer protein
  Pfam annotation: Domain name=CRAL_TRIO; Domain location=195-376; Score=89.0; E_value=1.5e-23; Accession=PF00650.10; Description =CRALTRIO domain
  Subcellular localization annotation: CTP_CleavageSite=34; ConfidenceScore=5.35e-01
MPHSPHAICAGSPAFRRLQCRLRHHRRRTIDAVPSSRGSGTTNTHSSSTTLAIVAFSHDASATSAVSAVSSDAISINTGATIAFAAKAVSTFASDSIPPRCPGTNHTTTPAKGGGATTRDAISTPARPSSGAQQTAALTDSCSAISGCPSCSSWRNSVSPTPVQAVKITNAKGEVKYPIKEIMICLSFPLFEYYYFFARSEEKSKKSFLLDFPLLHYVAKITSVDRYIKYHVQEFERAFRERFPACTLAAKRHIDSTTTFLDVQGAGFKNFSKTARELVHRMQKIDSDYYPETLHQMFVVNAGSGFKWIWNSVKGFLDPKTSSKIHVLGSNYQSMLLEVIDSSELPEFLGGSCTCSDKGVTAHVERGSVERGSGSGAD

SEQ ID NO: 83102 - protein, 154 aa, Zea mays
  Coding DNA Sequence Number=SeqID_41323
  Gene Ontology: Mol. function=transporter activity; Cellular component= intracellular; Biological process=transport
  Homolog annotation: Hit_ID=Q7F8U2; Match level="QueryCoverage=89%, HitCoverage=36%, E-value=3e-28, Identity=57%"; Hit description =Putative phosphatidylinositol-phosphatidylcholine transfer protein
MRAHLRHCPYSHLLTLHQMFVVNAGSGFKRIWNSVKGFLDPKTSSKIHVLGSNYQSRLLEVIDSSELPEFLGGSCTWLLDYGCLTPVHEEVKGTDRVTYLSYDDQSHLDMAPESYRGVRRATGMEHHKPMADFSQYSANRRHEIATDRILLGAG

SEQ ID NO: 83103 - protein, 137 aa, Zea mays
  Coding DNA Sequence Number=SeqID_41324
MAFSLALGQVQAAEAVTTRRGQLWAGEAVMTCMRPTSGRRCSRDSPEAGIGGGEHINTSWVAYGPPDGLPSEVCPQAATKLDKLDIGRDLRTRTHGMKKHRKNTKDGTEPKLCARELQHDGRKEETDLKRKRLSRPR

SEQ ID NO: 83104 - protein, 70 aa, Zea mays
  Coding DNA Sequence Number=SeqID_41325
MAWASSSSPCTLERSRVALSRDLRTRTHGMKKHRKNTKDGTEPKLCARELRHDGRKEETDLKRKRLSRPR

SEQ ID NO: 83105 - protein, 139 aa, Zea mays
  Coding DNA Sequence Number=SeqID_41326
  Subcellular localization annotation: CTP_CleavageSite=44; ConfidenceScore=5.24e-01
MCSRPPLLLPLAAAPPAYHLLSQFLQPPNPSRPPQSPPPKVPILAARIVVSWCDSPTVLVEGRREEGKGENPRKKQIAGFIFVDRLEVVDFRIVLRDFAQTSVKASKTVMFHRDLMVRPYRYIEHHMLPEKGYGAASYP

SEQ ID NO: 83106 - protein, 62 aa, Zea mays
  Coding DNA Sequence Number=SeqID_41327
MAAMPQAPHPVVDSQIILRDLPKLPVKASKTVMFHRDLMVRPYRYIEHHMLPEKGYGAASYP

SEQ ID NO: 83107 - protein, 210 aa, Zea mays
  Coding DNA Sequence Number=SeqID_41328
MGAAGAGRSSEVEVEVEGGAEAGRTGEEEPSGSEGGRPCVSSGGSREAGMDGVGWLRSIAVRAAEDAGFSKGMSYQKWAAAKHGRRGGLFSHWLQTRQRCRSITRATPEMESLATGDVAALSPRAIRFEEMVDSSTAGDVGEEQWLDEEGDATLRAEADECEAHHSCDPPTVTAVFQRRGGDEEACDHALDVAPHPHRAQIHDLGWGYGT

SEQ ID NO: 83108 - protein, 101 aa, Zea mays
  Coding DNA Sequence Number=SeqID_41329
MESLATGDVAALSPRAIRFEEMVDSSTAGDVGEEQWLDEEGDATLRAEADECEAHHSCDPPTVTAVFQRRGGDEEACDHALDVAPHPHRAQIHDLGWGYGT

SEQ ID NO: 83109 - protein, 150 aa, Zea mays
  Coding DNA Sequence Number=SeqID_41330
  Subcellular localization annotation: CTP_CleavageSite=47; ConfidenceScore=5.24e-01
MEGCRASNARGWKVAAPASSARIAPALLATNDRGWKVAAPNRRSRKSASAAKVLAERRPTTSSTQINNLNKSHAWIDAENAGLFFTCSNPDNVPKEVPSDLEELYLQRQNPRGALKLFFPVFEALFLYRLSGALKLSYVFYFAKLLILNK

SEQ ID NO: 83110 - protein, 209 aa, Zea mays
  Coding DNA Sequence Number=SeqID_41331
  Subcellular localization annotation: CTP_CleavageSite=53; ConfidenceScore=5.61e-01
MKFINIWRLLLSSSTCLLGNFLLVPKMHLFTAFSSLTSNSVIFLASAFLSTTATSMAGTITMPFSSLNPAGSDGHLVVGIRPQHIDRASNVGGYKVLMEPVVLNRERAAADRLKRMPILFDDYRDEDFYGLPRKYSIVARVEVKFLIEPRFRDRQHFILSDINVTIECSGLFSTPVRTEGSKIVCYLLQSFAADQTYGVSSLDGIECIL

SEQ ID NO: 83111 - protein, 352 aa, Zea mays
  Coding DNA Sequence Number=SeqID_41332
  Subcellular localization annotation: CTP_CleavageSite=47; ConfidenceScore=5.27e-01
MEGCRASNARGWKVAAPASSARIAPALLATNDRGWKVAAPNRRSRKSASAAKVLAERRPTTSSTQRNNLNKSHAWIDAENAGLVKVLHLVYLVYRKKSKFFTCSNPDNVPKEVPSDLEELYLQRQNPSYLYGISRLYILALPPFVLGYKVYMHSSGYKVLMEPVVLNRERAAADRLKRMPILFDDYRDEDFYGLPRKYSIVARVEVKFPIEPRFRDRQHFVLSDINGAKIEAITYMYETVKHFDNLLHEKHVYKMHNVKFSLHPGEFNFRHLNGPMELCLDQQTIVEPYTVPIQMAPFPKQILLNLADIAELPNRTLVGDIYISLKFESASSLRIIPQYTSIRSITTPIIVD

SEQ ID NO: 83112 - protein, 277 aa, Zea mays
  Coding DNA Sequence Number=SeqID_41333
MEPVVLNRERVAADRLKRMPILFDDYRDEDFYGLPRKYSIVARVEVKFPIEPRFRDRQHFVLSDINGAKIEAITYMYETVKHFDNLLHEKHVYKMHNVKFSLHPGEFNFRHLNGPMELCLDQQTIVEPYTVPIQMAPFPKQILLNLVDIAELPNRTLVDIMAVVVHLDTIHRTMWGPFRKIVIMDARGYLHIIKVWGDLLNKNALRWALAKEDYGIIIGTMFRRFRRQECLESSDHTAIHFNPFHHNTHHFGPIQKALVARNNRQFAVTFLEEQRRR

SEQ ID NO: 83113 - protein, 154 aa, Zea mays
  Coding DNA Sequence Number=SeqID_41334
MWLPANGSSLLGSMGGMIAAAWHYATGLAATAALAAIDAATTVALTATAGTIATVATATTVTLTVTTATTVTLATVAAVVALPTTVTAVVAAVTLATVVALVVTIAAAPLLGRVKGVRLIRGDPRLVAEPPKLLGPHAPVPCLNDLRRLCMCTK

SEQ ID NO: 83114 - protein, 182 aa, Zea mays
  Coding DNA Sequence Number=SeqID_41335
MGRGRRGHGWPRCGYNKRKRAPSPSSEDFGDSEYSEEVSFELDRSPTLASPPASSEDSDDSMGLSTVARAYWRSIERAELGGSDESGVSSDEADSSDSSKEWSGSDGDDEGDGSGDDSGDGDGGDEGDDSGKGGSEGDGGSCNDGDGGDGISKGDGGDGDSKGDSGDDGSGDGKANGTAPLV

SEQ ID NO: 83115 - protein, 69 aa, Zea mays
  Coding DNA Sequence Number=SeqID_41336
MQFLPMPTPLVESLAFAAGSSASALPALAVQAPAPGGNDPDDSGDDDDDKEEEVEEEEEENINDEANDE

SEQ ID NO: 83116 - protein, 100 aa, Zea mays
  Coding DNA Sequence Number=SeqID_41337
MGAWAGVVAEKSGDVRECARTGPRVILEDSSEEFLPTPTPLAESLAFVAGSSASAPPALAVQAPAPEGDDPDDSGDDDDDKEEEVEEEEEENINDEANDE

SEQ ID NO: 83117 - protein, 93 aa, Zea mays
  Coding DNA Sequence Number=SeqID_41338
MQDAARRALSQYCSLFSGVADGLDLKYYPRRSIGSAGGVIVSPVDEGNPRLSSMVNLAAVLHTELDHALDELGKMSENRRRGVRRAQPEQQAS

SEQ ID NO: 83118 - protein, 241 aa, Zea mays
  Coding DNA Sequence Number=SeqID_41339
MTTSLVVERSEPSCGLPLPSASRMFIIRAGEEGEPNGSSAFRVGWRSASSSSIRGRRAFAGLAEEANSGRTERSYKTLYAVRVEAAFLDGLVLTLVVRTRAKTSSCVLVQPLSIGAEVVATTGGDDVVASAGEAAHCRGGCLRWRDRQCHLPSDPDSLALMASLLPPVGGRGRGPIRSSAHPEVIAATGEPLGAEVVVAAGAEVVAIVGGDVRRQLPTRLLPVQRSSFLQKWSWGPACKGM

SEQ ID NO: 83119 - protein, 399 aa, Zea mays
  Coding DNA Sequence Number=SeqID_41340
MRWIHAAQHLLACPLAILLVAGQERISSLLLGRTGNEQALRVIGCTLARRVKWLVGDGDVRVLKGACTKGLGPDMWAQGLHDFSSGLARWLMPWATSSGSPPEREVEGKARTHNPVTVPRRRGISASGGAVSLHTVRSLVHAGGDFTRGASGARAGRSAFKKGSISRAVVMPRSSCDNRALSPSGPPDGVRRCSLEGSASRPSLHSWWCRRSCLLPAAVGGVQPHGSWHPSTTIWLQGFSSCSPAAVPRRWSSRRMTTSLVVGRSKPGCGLPPALSFKDVHHLCWGGGCAELGPASTWVAARFFPQCSGEKGVRRLWRCQLQRVWLPGLGSSGAASGAASYRWGGAWLPIHRTGDGRTVRGLATSTASPAVPVVLGGRTRRHTPCGWGRRSWMVLSSLP

SEQ ID NO: 83120 - protein, 218 aa, Zea mays
  Coding DNA Sequence Number=SeqID_41341
  Homolog annotation: Hit_ID=Q6Z7V1; Match level="QueryCoverage=25%, HitCoverage=7%, E-value=1e-23, Identity=92%"; Hit description=LMBR1 integral membrane protein-like
MQPWRACQYAFRTPPNDPVWSIVTFLFLLRFFASPGEASKRISGERRGGDMWVFYLISLPLTLGMVVVTLRYFAGPAVPRYVVATVGYAWFCSLSIIILVPADIWQVRSLAASLSHLFIHRPLFRPSSAPGSAGLAVGVVRSTGCGSCRVLVALQSWDINCQCEGGHWILLELVLLEHIYPNMSLLVHEISVLKASPRRPGGGLTPRRLARLPRLGAA

SEQ ID NO: 83121 - protein, 104 aa, Zea mays
  Coding DNA Sequence Number=SeqID_41342
  Gene Ontology: Mol. function=tetraacyldisaccharide 4'-kinase activity; Biological process=lipid A biosynthetic process
  Homolog annotation: Hit_ID=Q2AEU6; Match level="QueryCoverage=46%, HitCoverage=12%, E-value=1e-09, Identity=61%"; Hit description =Tetraacyldisaccharide-1-P 4'-kinase
MTVCRQHWSLLRDVEIVMVNGLAPWGNSHFIPRGPMREPLSALGRADIVVIHNADMNSVLKASPRRPGGGLTPRHLARLPRLGVAYAPPRRPGGAPTPWTALPL

SEQ ID NO: 83122 - protein, 140 aa, Zea mays
  Coding DNA Sequence Number=SeqID_41343
MAGEGSARLTAWGKLASNHQGATRRASEGSAGMKRDEGGTGAGRENRRQGRASSAGAAGGHGRGSAHREGFRGSRHGERRRWGRAAGGGERGCEGERWETELGRAPCLGAEGECKQTGSAPAMAEGGGGHGSSDGGCGVE

SEQ ID NO: 83123 - protein, 83 aa, Zea mays
  Coding DNA Sequence Number=SeqID_41344
MGRGGDGGELQVEESAAVRESAGRRSLGELHAWELREQRGDFQCSMVTAAARKGEGTHTGRTPEEKQQRSSSTNDEGSDCGRT

SEQ ID NO: 83124 - protein, 336 aa, Zea mays
  Coding DNA Sequence Number=SeqID_41345
  Gene Ontology: Biological process=electron transport
  Homolog annotation: Hit_ID=Q10I64; Match level="QueryCoverage=51%, HitCoverage=30%, E-value=2e-72, Identity=79%"; Hit description=FAD -binding domain-containing protein, putative, expressed
MGYTTCGYRVQPLQSVKLPYTSHELPPLVSSCHVIPHNLLSDEHVWLEARRGLREPAPERRAVRGVPRGGPEDVLLTVCPWDPRVRGGTLFHQTTFSLPVRRAVLFVAEVHRLRDLEPRALCGMELYDGILMRYVKASTVYLGKPAPRGEPSGDMVDFDITYYRSCDPGQARLFEDVLEEVVQMGIFKYGGLPHWGKNRNLAFVGAARKYPGLPRFLRIKDAYDPDGLFSSGGGERCGQLRALVLLVEHDVGERGQRRGRCAHGGVRVPDAAQRGGQEPGHERRDGVPLVLSGDERQQPKRVPPQRRPVGCEGGWKRGGVCGRACGRMRGRFTLLT

SEQ ID NO: 83125 - protein, 341 aa, Zea mays
  Coding DNA Sequence Number=SeqID_41346
  Gene Ontology: Biological process=electron transport
  Homolog annotation: Hit_ID=Q10I64; Match level="QueryCoverage=50%, HitCoverage=30%, E-value=2e-72, Identity=79%"; Hit description=FAD -binding domain-containing protein, putative, expressed
  Subcellular localization annotation: CTP_CleavageSite=43; ConfidenceScore=5.30e-01
MARQQPERVPPQRRPVGCGGGWKRVGVCGSPPLSGGLFAAATSASSRSECRRSGVLSVVEPAPERRAVRGVPRGGPEDVLLTVCPWDPRVRGGTLFHQTTFSLPVRRAVLFVAEVHRLRDLEPRALCGMELYDGILMRYVKASTVYLGKPAPRGEPSGDMVDFDITYYRSCDPGQARLFEDVLEEVVQMGIFKYGGLPHWGKNRNLAFVGAARKYPGLPRFLRIKDAYDPDGLFSSGGGERCGQLRALVLLVEHDVGERGQRRGRCAHGGVRVPDAAQRGGQEPGHERRDGVPLVLSGDERQQPKRVPPQRRPVGCEGGWKRGGVCGRACGRMRGRFTLLT

SEQ ID NO: 83126 - protein, 104 aa, Zea mays
  Coding DNA Sequence Number=SeqID_41347
MGQVPRADLSVGAAIVPEEIADAIVAPSPPDLLLAPASTPAGAVADSPAEPPVASDVGMVEESPLVVVPDLPVLGHEERATAVAEELADMSTAKSLFIHRESGI

SEQ ID NO: 83127 - protein, 90 aa, Zea mays
  Coding DNA Sequence Number=SeqID_41348
MAAVPQRALGFGCLRPIDAILEDLLDLWVRTHTRFRCATLILLVDVDRMVFIGVLEVAKWTGARGKNSEKRRWMHIAEHGMTVGLCREGE

SEQ ID NO: 83128 - protein, 121 aa, Zea mays
  Coding DNA Sequence Number=SeqID_41349
EELEIAKWTGARGKGSEKREYLLSKVIEGRGEEQDVQDGGMSTIKDGVKARNVTDEGENATEVRIGKTPFSNQDGKDDIPKGRHKITSYKDLEITKGWKRGGFKGYVQSKHEGKGIDITRV

SEQ ID NO: 83129 - protein, 225 aa, Zea mays
  Coding DNA Sequence Number=SeqID_41350
TEWVLDMVYCLLGWDALAFGGRTCVDAIHPKVCGLVGAALFHRCLASRMFISLTVVESELSCGFASHMGWWPASSSSIRRKRMITSLVKEEGRGEGLFAMARTLRWSPPLGRLPGAQVVTAAEVVASAGEPPGASFQRDPAGPWYGTRLSSYTAPDHPRRQDFGYRTRLSGHTGSGPPHGMGSRSLEPALGYRALLLSQRGPKLQAWLFNSDVLMSDEMGTVRVG

SEQ ID NO: 83130 - protein, 353 aa, Zea mays
  Coding DNA Sequence Number=SeqID_41351
MAPGLALGEGTSLQVGPKLDSRLARRFRALADIITVSPPSVTSTIMLVPAANWHKPAPKEDDSWAQAPMPETGLSVSVGAKRRTTAGSRAGVFAFKEGFIPRVAAMPCFSPTRGVLSPPSSLHPFAFKTEWVLDMVYCLLGWDALAFGGRTCVDAIHPKVCGLVGAALFHRCLASRMFISLTVVESELSCGFASHMGWWPASSSSIRRKRMITSLVKEEGRGEGLFAMARTLRWSPPLGRLPGAQVVTAAEVVASAGEPPGASFQRDPAGPWYGTRLSSYTAPDHPRRQDFGYRTRLSGHTGSGPPHGMGSRSLEPALGYRALLLSQRGPKLQAWLFNSDVLMSDEMGTVRVG

SEQ ID NO: 83131 - protein, 74 aa, Zea mays
  Coding DNA Sequence Number=SeqID_41352
MGSGRTPCAIATNFAGLVLLGLLAGGHRRGLGTATTQLPRVKKMVEDRWIRDEGLRHLDLDRMDLSAAYPFGHA

SEQ ID NO: 83132 - protein, 106 aa, Zea mays
  Coding DNA Sequence Number=SeqID_41353
MWILNEREMVGLGSLIDGGRLCPGVNDRLGALAQLLLGLLADGHRRGLGTATTQLPRHYRNPEDSRWPEYDELPRGRPHYTCAHMISCQAIRSGISTVKMLNEQQK

SEQ ID NO: 83133 - protein, 167 aa, Zea mays
  Coding DNA Sequence Number=SeqID_41354
MDWDDSGALENFEAAKERFGAKYHGEPFEDPLLDPDMYIDEVDHLCEVDPELVADLDKVPDVDKVVELQLVANLGCGEPVADLRRAHRVAPPQRRPRPAAPPQAPAAPAVAPQRRPSPTTPFDALAAPPARAPDVPPPSPTPCQPTPPTRRRPRRALPRPVNLAFIK

SEQ ID NO: 83134 - protein, 84 aa, Zea mays
  Coding DNA Sequence Number=SeqID_41355
MLSRREKATNFKPDYDIDIHMKVLAMSVQESGILTGYKMKVVFVYDANLLIVAHVHAGEDGMRERGERGVAVDVQWQTQKSSKA

SEQ ID NO: 83135 - protein, 200 aa, Zea mays
  Coding DNA Sequence Number=SeqID_41356
MATGHAAPGIRRRLAASRFRGYSAVRVPMETSPDHPDYTINGEEKLFFGQVKLLFQFIPLLKLSIVHTQQLMYLSTLHPSEEMLSRREKATNFKPDYDIDIHMKVLAMSVQESSILTGYKMKVRTIKVEKRINEIVNRLNKTKVERKPDLKAFPKAPPEEAFGKSLGSCSLKASLLFVQQSAAFISLKKLLPCLGEPLAF

SEQ ID NO: 83136 - protein, 250 aa, Zea mays
  Coding DNA Sequence Number=SeqID_41357
  Homolog annotation: Hit_ID=Q014T5; Match level="QueryCoverage=39%, HitCoverage=46%, E-value=8e-17, Identity=46%"; Hit description=[R] KOG3272 Predicted coiled-coil protein
  Subcellular localization annotation: CTP_CleavageSite=20; ConfidenceScore=5.31e-01
MATATLLLGSAAALPRPGFAATAPFASQWRRRQIQQDNSNFASFGRLIPNFLVTRMKHAHTDHPDYTINGEEKLFFGQVKLLFQFIPLLKLSIVHTQQLMYLSTLHPSEEMLSRREKATNFKPDYDIDIHMKVLAMSVQESSILTGYKMKVRTIKVEKRINEIVNRLNKTKVERKPDLKAEREAISAAEKAERKAQLRDKKRREEMERLDKEKQADIRSYKGLMVQEKMTSNKQIASGSKTLQELEEDFM

SEQ ID NO: 83137 - protein, 172 aa, Zea mays
  Coding DNA Sequence Number=SeqID_41358
  Homolog annotation: Hit_ID=Q014T5; Match level="QueryCoverage=57%, HitCoverage=46%, E-value=3e-17, Identity=46%"; Hit description=[R] KOG3272 Predicted coiled-coil protein
METSPDHPDYTINGEEKLFFGQVKLLFQFIPQMLSRREKATNFKPDYDIDIHMKVLAMSVQESSILTGYKMKVRTIKVEKRINEIVNRLNKTKVERKPDLKAEREAISAAEKAERKAQLRDKKRREEMERLDKEKQADIRSYKGLMVQEKMTSNKQIASGSKTLQELEEDFM

SEQ ID NO: 83138 - protein, 128 aa, Zea mays
  Coding DNA Sequence Number=SeqID_41359
  Subcellular localization annotation: CTP_CleavageSite=36; ConfidenceScore=5.39e-01
MRQGVPFIAPRQLGAVGNKSGRPSLPSVSWRTGQSVAGEKPESGLFGRGSLAHRTLSAEREAISAAEKAERKAQLRDKKRREEMERLDKEKQADIRSYKGLMVQEKMTSNKQIASGSKTLQELEEDFM

SEQ ID NO: 83139 - protein, 133 aa, Zea mays
  Coding DNA Sequence Number=SeqID_41360
  Homolog annotation: Hit_ID=Q4RF49; Match level="QueryCoverage=64%, HitCoverage=42%, E-value=1e-17, Identity=50%"; Hit description =Chromosome 14 SCAF15120, whole genome shotgun sequence
  Subcellular localization annotation: CTP_CleavageSite=35; ConfidenceScore=5.47e-01
MAAATLLLGSAAALPRPGFAATTPFASQWRRRQVRTIKVEKRINEIVNRLNKTKVERKPDLKAEREAISAAEKAERKAQLRDKKRREEMERLDKEKQADIRSYKGLMVQEKMTSNKQIASGSKTLQELEEDFM

SEQ ID NO: 83140 - protein, 210 aa, Zea mays
  Coding DNA Sequence Number=SeqID_41361
  Homolog annotation: Hit_ID=Q4RF49; Match level="QueryCoverage=41%, HitCoverage=42%, E-value=3e-17, Identity=50%"; Hit description =Chromosome 14 SCAF15120, whole genome shotgun sequence
  Subcellular localization annotation: CTP_CleavageSite=35; ConfidenceScore=5.47e-01
MAAATLLLGSAAALPRPGFAATTPFASQWRRRQVRTIKVEKRINEIVNRLNKTKVERKPDLKAEREAISAAEKAERKAQLRDKKRREEMERLDKEKQADIRSYKGLMVQEKMTSNKQIASGSKTLQELEEDFIYNSSLAMSFANPASANSHQLGRGSFSSSAAILGQVAEDAVRLREERNESTTAAFLEQDLEVKYGLIELLTMHKQLQR

SEQ ID NO: 83141 - protein, 146 aa, Zea mays
  Coding DNA Sequence Number=SeqID_41362
MEETTKQPLSILDHPHSVFAHPFVILSDSSSVLVRTLFVHGEKFNQPIFHCNNISGFVEPEGGCGTFVPLFLNLTVSVRRYNEFEAQSAANMAPRVDPLQAAQTPIDDMMRHAYVDPNDPTKIYLQQPAPESQLRRRNYHGPADAN

SEQ ID NO: 83142 - protein, 65 aa, Zea mays
  Coding DNA Sequence Number=SeqID_41363
MRLHILRGMKAEVILAFADICTHEVLIHVGNEGSSSMSTFTLTITLPRRSHDLIRNLLSKEILCK

SEQ ID NO: 83143 - protein, 190 aa, Zea mays
  Coding DNA Sequence Number=SeqID_41364
MRYLIHVGNEGSSSTSTFTLTIALPRWQKCCLVASGVFVDPRGVTLTLDAQYDFLARHHRQMITRAEDAEKRNRQLHVDLTTAPARTTTLESREVIAVEALKQAKDEHVHKLMEDYLVTHNQHRALRIQEPPPSNPVQPMRAEDPQILEGHPVSTRGEKKTWELPEGAIVLEGIPVFPQAMDKQEHPESS

SEQ ID NO: 83144 - protein, 76 aa, Zea mays
  Coding DNA Sequence Number=SeqID_41365
  Subcellular localization annotation: CTP_CleavageSite=48; ConfidenceScore=5.11e-01
MAQWLTRSTLAGGRRESGDRGLASPAKQTSIPRSGSFTENASNTWKCSSARVQTPAEIANNLGGFGAIFKVNTVDL

SEQ ID NO: 83145 - protein, 76 aa, Zea mays
  Coding DNA Sequence Number=SeqID_41366
MAQWLTRSTLAGGRRESGDRGLASPAKQTSIPCSGSFTENASNTWKCSSARVQTPAEIANNLSGFGAIFKVNTVDL

SEQ ID NO: 83146 - protein, 111 aa, Zea mays
  Coding DNA Sequence Number=SeqID_41367
  Homolog annotation: Hit_ID=Q40002; Match level="QueryCoverage=34%, HitCoverage=6%, E-value=2e-12, Identity=84%"; Hit description =Vacuolar ATP synthase catalytic subunit A
METRFWELKIAFGNYPSSSRLLLELAPLLCRDYGFMLRLWHLSYSTGNRHLSSSYVPLKKEGSSILNDKKNTKNTLMQHHVALPPGSMRKISYIAPAGQYNLQDTVLELEF

SEQ ID NO: 83147 - protein, 138 aa, Zea mays
  Coding DNA Sequence Number=SeqID_41368
  Homolog annotation: Hit_ID=Q40002; Match level="QueryCoverage=47%, HitCoverage=11%, E-value=7e-15, Identity=62%"; Hit description =Vacuolar ATP synthase catalytic subunit A
MAGAAATGKMAARVRMLGLMGLRILTVYINNSFYFNCLQNFFGPSNEFQASRGQDSRMPKIEYNLVAVPTKQSRLICICLPLHQNYRFFLEHIDAAPCCSSTRFYEENKLHCTNWSVQPSGHSARIGISGHKKNFTVL

SEQ ID NO: 83148 - protein, 57 aa, Zea mays
  Coding DNA Sequence Number=SeqID_41369
  Homolog annotation: Hit_ID=Q40002; Match level="QueryCoverage=84%, HitCoverage=8%, E-value=1e-14, Identity=75%"; Hit description =Vacuolar ATP synthase catalytic subunit A
MKYCETCMNTLMQHHVALPPGSMRKISYIAPTGQYNLQDTVLELEFQGIKRILPCFR

SEQ ID NO: 83149 - protein, 140 aa, Zea mays
  Coding DNA Sequence Number=SeqID_41370
  Gene Ontology: Mol. function=hydrogen ion transporting ATP synthase activity, rotational mechanism; Cellular component=proton -transporting two-sector ATPase complex; Biological process=ATP synthesis coupled proton transport
  Homolog annotation: Hit_ID=Q40002; Match level="QueryCoverage=62%, HitCoverage=13%, E-value=8e-15, Identity=53%"; Hit description =Vacuolar ATP synthase catalytic subunit A
MNSTNCFSRLHEDEFQASRGQDSRRPKIDPCIVPQNSHPPVEEVSYGASAPHALQFPRVKEVMVNGVHVKDEILRDLHEETSYGFFLEYNLNTLMQHHVALPPGSMRKISYIAPTGQYNLQDTVLELEFQGIKRILPCFR

SEQ ID NO: 83150 - protein, 200 aa, Zea mays
  Coding DNA Sequence Number=SeqID_41371
  Pfam annotation: Domain name=zf-CCHC; Domain location=108-120; Score =1.9; E_value=0.48; Accession=PF00098.13; Description=Zinc knuckle
  Pfam annotation: Domain name=zf-CCHC; Domain location=58-75; Score =20.9; E_value=0.00035; Accession=PF00098.13; Description=Zinc knuckle
  Pfam module annotation: Pfam domain module=zf-CCHC::zf-CCHC; Domain location=108-120::58-75
MKAPTPSSSSEEEEEEESDDDEDNQPSTSSSEDEKTIQCVGKVEDLLFNIDRKKQRKRGCFTCEEKGHFRDSCPNMAELKKGRSKGKDVVIETCSDEIAMENEQLKLCHKEGHKSFQCKAKTGDKQKQKPTRKISNIYINKVDKKAATTFLIKKKKNGKVIAIKANKQANKGKGAKRIWVPNEIISTMKSTKKAWITRGK

SEQ ID NO: 83151 - protein, 126 aa, Zea mays
  Coding DNA Sequence Number=SeqID_41372
  Subcellular localization annotation: CTP_CleavageSite=25; ConfidenceScore=5.22e-01
MEKPVPSLLMLLLSRGRVPLNSPTRCRSGLTALAYNASLTPTGRRAVTALVPTITGMGDHVSGRVRGYVRWQVQSEQWQAGPLVQALVLGLGQPPGQLLAPAQGCTLRQQDYSLSKCNEHISVDNL

SEQ ID NO: 83152 - protein, 126 aa, Zea mays
  Coding DNA Sequence Number=SeqID_41373
  Subcellular localization annotation: CTP_CleavageSite=25; ConfidenceScore=5.21e-01
MEKPVPSLLMLLLSRGRVPLNSPTRCRSGLTALAYNASLTPTGRRAVTALVPTITGMGDHVSGRVRGYVRWQVQSEQWQAGPLVQALVLGLGQPPGQLLAPARGCTLRQQDYSLSKCNEHISVDNL

SEQ ID NO: 83153 - protein, 75 aa, Zea mays
  Coding DNA Sequence Number=SeqID_41374
MMSENRRRCVRHAQSEQQAPQEEAAQQQQLPPPPLMTIEQMFLMQTQAVQAIGQTLAAMQRVQQQPPPPQPPVQV

SEQ ID NO: 83154 - protein, 88 aa, Zea mays
  Coding DNA Sequence Number=SeqID_41375
VAMRLLVLVLTLIMMSENRRRCVRHAQSEQQAPQEEAAQQQQLPPPPLMTIEQMFLMQTQAVQAIGQTLAAMQRVQQQPPPPQPPVQV

SEQ ID NO: 83155 - protein, 464 aa, Zea mays
  Coding DNA Sequence Number=SeqID_41376
  Gene Ontology: Mol. function=polygalacturonase activity; Cellular component=cellulose and pectin-containing cell wall; Biological process=carbohydrate metabolic process
  Homolog annotation: Hit_ID=Q10SE9; Match level="QueryCoverage=90%, HitCoverage=91%, E-value=0.0, Identity=84%"; Hit description =Polygalacturonase, putative, expressed
  Pfam annotation: Domain name=Glyco_hydro_28; Domain location=78-435; Score=25.4; E_value=2e-10; Accession=PF00295.8; Description=Glycosyl hydrolases family 28
MAPGRSLRPVIIPSPPRCIFDDGPKSGTMFWWSVSSVTDQAAFHVARVTEYGAVGDGRTLNTAAFARAVADLARRAPDGGAALVVPPGKWLTGPFNLTSCFTLYLDEGAEILASQDMKHWPLIAPLPSYGRGRDEPGPRYSNFIGGSNLTDVIITGKNGTINGQGQVWWDKFHAKELKFTRGHLLELLYSDNIIISNVTFVDAPYWNLHPTYCTNVTISGVTILAPVNSPNTDGIDPDSSSRVKIEDCYIVSGDDCVAVKSGWDEYGIRFNMPSQHIVIRRLTCVSPTSAMIALGSEMSGGIRDVRAEDSVAINTESAVRVKSGAGRGGFVRDIFVRGLSLHTMKWVFWMTGNYGQHPDNTSDPNAMPEVTGINYSDVFAENVTMAGRMEGIPKDPYTGICISNVTARLAPDAKELQWNCTNVKGVTSHVSPKPCPELAAEGKPCAFPEEELVIGPPELPKCSY

SEQ ID NO: 83156 - protein, 320 aa, Zea mays
  Coding DNA Sequence Number=SeqID_41377
  Subcellular localization annotation: CTP_CleavageSite=65; ConfidenceScore=5.53e-01
MSSSSLMRRIFPPSKPPDGGCPPSFRLIVGGTQLRGSWYLSAIVRLQGFSSASPAAPPRRRSPKMAKMEDEASRGAAFVGVGCPLLPRASGGERHPPAPRRLPPAMPGEAGRRHSARAQHHVLRPDDGSPGSPSPGLNGWLSSSVGESPSAVAPALKPLLKLLRHSGRGWGTEPEFRLRRRFECRYFCSLRLSGPEHEFLGSVGLAVRGSSSSVKGTPRPLFDEPRPGTRPQVGLAPSGDGLGRGPGGNRPSRLLGPDSRRSPWQRLPERGDDVVLRSGEPRTASPSEAKSGLAGGVVDAEGVAASFQRQDPSLQGQSVL

SEQ ID NO: 83157 - protein, 146 aa, Zea mays
  Coding DNA Sequence Number=SeqID_41378
MEDEASRGAASVGVGCPLLPLASGRERHPPASRRLPPAMPGEAGRRHSARAQHHVPRPDDGCAAHHEGSAHALGGLGKGEDLPACFEASAAGDGFSTDEIANSASSPGSPSPGLNGWLSSSVGESPSAVAPAPKPLLKLLRRSGRG

SEQ ID NO: 83158 - protein, 141 aa, Zea mays
  Coding DNA Sequence Number=SeqID_41379
MLEKCALSIKKYADSKRAKIIQDEALQYAEDDEAADDLEELPSPDLLTQADILEKYFGIEYDSDQSRVRQRRHGCDVIMLKDPKKRLSPVVYHFPLFVGFTDGWKHLVIANDLRAEDVCELVKGPDDGEPVYYVRMCGHKI

SEQ ID NO: 83159 - protein, 117 aa, Zea mays
  Coding DNA Sequence Number=SeqID_41380
MENGIGGMPEIGSGSKLADRSALSNAVRQRRHGCDVIMLKDPKKRLSPVVYHLPSFVGFTDGWKHLVIANDLRAEDVCELVKEPDDVEPVYYVRMCGHKIKSRPGFICALLFSYVGY

SEQ ID NO: 83160 - protein, 43 aa, Zea mays
  Coding DNA Sequence Number=SeqID_41381
VPARGRTFGPKDPSSDRACPRTATPGVLSNRPCPISLDMDACE

SEQ ID NO: 83161 - protein, 244 aa, Zea mays
  Coding DNA Sequence Number=SeqID_41382
MGVPRKRTHGAPGAKEHQYYLLPRGANPANHRVFERKLRPKPSSGGHVCLGVTPKDTPNTPPRGEGRGVWPPAPQGEVGRSRGCRRTAPGAARGGRHQVVLGAASRRAAGHSALRTHRATELALGPRPQGSGWGLATRTGRMRNGSCWSADRLGAWTVVAHAGGQSPGALGAPGSRRRRGRYPRASGAPLGALRRNGLRAPHPTRLETRTKESDMRASRRVQKPEMRKEADEREALTGRTAGRP

SEQ ID NO: 83162 - protein, 247 aa, Zea mays
  Coding DNA Sequence Number=SeqID_41383
  Homolog annotation: Hit_ID=Q94KS6; Match level="QueryCoverage=19%, HitCoverage=16%, E-value=3e-18, Identity=91%"; Hit description=Beta -expansin 8 precursor
  Pfam annotation: Domain name=DPBB_1; Domain location=144-227; Score =36.8; E_value=7.5e-08; Accession=PF03330.8; Description=Rare lipoprotein A (RlpA)-like double
  Subcellular localization annotation: CTP_CleavageSite=29; ConfidenceScore=5.24e-01
MSLANLQSCSPRRHARISVGRALRPRPSRAELRVSTPAIPPFAFPHPLYLPPITSPAIRFRRMGIEDLDRSTRHPARVSPQNKYSIFVTHLFIINVIHASTLDHSSFLISPSHAVPPPSRSHKHLRPRRSRPTPASLHAGGLVGSCSSSSVVPAGVAVAGTRGPEPPGTASTTALAPTTTETVIITDMNYYPVSKYHFDLSGTTFGRLAKLGLNDKLRHSGIIDIKFTRIHRRHWGFESSLVARRHV

SEQ ID NO: 83163 - protein, 264 aa, Zea mays
  Coding DNA Sequence Number=SeqID_41384
  Homolog annotation: Hit_ID=Q94KS6; Match level="QueryCoverage=18%, HitCoverage=16%, E-value=4e-18, Identity=91%"; Hit description=Beta -expansin 8 precursor
  Pfam annotation: Domain name=DPBB_1; Domain location=144-227; Score =36.8; E_value=7.5e-08; Accession=PF03330.8; Description=Rare lipoprotein A (RlpA)-like double
  Subcellular localization annotation: CTP_CleavageSite=29; ConfidenceScore=5.24e-01
MSLANLQSCSPRRHARISVGRALRPRPSRAELRVSTPAIPPFAFPHPLYLPPITSPAIRFRRMGIEDLDRSTRHPARVSPQNKYSIFVTHLFIINVIHASTLDHSSFLISPSHAVPPPSRSHKHLRPRRSRPTPASLHAGGLVGSCSSSSVVPAGVAVAGTRGPEPPGTASTTALAPTTTETVIITDMNYYPVSKYHFDLSGTTFGRLAKLGLNDKLRHSGIIDIKFTRIHRRHWGFESSLVARRHVVWRPLDLCCQCGAPSRQ

SEQ ID NO: 83164 - protein, 249 aa, Zea mays
  Coding DNA Sequence Number=SeqID_41385
  Subcellular localization annotation: CTP_CleavageSite=15; ConfidenceScore=5.06e-01
MTTCMASPYTYSYISCAAVSSVRAPRSSVRTAEAATASEVGCGVGDWGTYGHCRSCFSGQKVSEVLDFLSESSSGLGYYKHQYMIAYRNESLETSWRRPGWGSMAAPGTFGRSNGSRRRRREHQRQPRTGPSSTGAQDREHRSRAQERERLRARARAGAAARRGRRSESTGAQEPRTGARETESESPDLEPPHGEDAGARLRESVRVTTMSSFAVREGSGRAAAECAIWAAGRQPSICGAVGSYVNGPV

SEQ ID NO: 83165 - protein, 58 aa, Zea mays
  Coding DNA Sequence Number=SeqID_41386
  Homolog annotation: Hit_ID=Q9FUH4; Match level="QueryCoverage=88%, HitCoverage=11%, E-value=2e-18, Identity=86%"; Hit description =Putative nematode-resistance protein
MSKDTVLVAAVICTAKASGNRALFVPAEGMDLLAQMFLEPPYYPSLDAAKTFLADYWV

SEQ ID NO: 83166 - protein, 252 aa, Zea mays
  Coding DNA Sequence Number=SeqID_41387
MTLSWPSTRHGKKPVVVAEEGPSQEATPATKKRKIGSDAGQLAVVPTTVVATSPTAASGAKGASQDPWSNFYASGEISSVAAAKDVMGSVSQQLRHASQQLKHSSVFGRSTRMERLAAAEAEKGDLQRQLVEERRDKNKAIADAQAAQAEAKLAWAEASLACQRAEELEARLGGLRNRVDKAEASTRVEIERTHAQLVDAYWELGARTTAFEATGQEVGLRFLEWLQAELAMLPTIVTGLMSFASLVTCEGP

SEQ ID NO: 83167 - protein, 162 aa, Zea mays
  Coding DNA Sequence Number=SeqID_41388
MANVKQTARRRQRICSSWGILGTMLCVSQGWKRSEPEGELVVFEAFFTASLRLPAHRFVAEVLQRFEVQVAEDDEDEGALRCAARMSNGRDLVEEFIGYGVWPLAHGWVLGEVCPRQMPTLGQQLMTLQRLLTAVGKNQWSWLRKALRGMLPQPLRREKIGL

SEQ ID NO: 83168 - protein, 78 aa, Zea mays
  Coding DNA Sequence Number=SeqID_41389
  Gene Ontology: Mol. function=isomerase activity
  Homolog annotation: Hit_ID=Q65XK0; Match level="QueryCoverage=50%, HitCoverage=6%, E-value=1e-10, Identity=85%"; Hit description =Putative ketol-acid reductoisomerase
MVDIFKAYLGVLLVKGSKECCWQKNQRRIWTKLKAYFRLVFGKVLNLLMKPKQQDSPKRVELWVIYGRLYQAVILFCY

SEQ ID NO: 83169 - protein, 166 aa, Zea mays
  Coding DNA Sequence Number=SeqID_41390
  Gene Ontology: Mol. function=oxidoreductase activity
  Homolog annotation: Hit_ID=Q8LB59; Match level="QueryCoverage=44%, HitCoverage=27%, E-value=8e-29, Identity=79%"; Hit description=Minor allergen
MDDGMVLQHPRETHLNSTSHGIWRLEVRIDLRSNNHFAPKESTYNFYSLRLVFGKVLNLLMKPKQQDSPKRVELWVIYGRLYQAVILFISWMAITQLAHHEMLFVPIGFTFGSGMFDMDGIRGGSPYGAGVFAGDGSRQPSETELALAEHQGKYMASIMKKLALHA

SEQ ID NO: 83170 - protein, 101 aa, Zea mays
  Coding DNA Sequence Number=SeqID_41391
  Gene Ontology: Mol. function=oxidoreductase activity; Cellular component=membrane fraction; Biological process=negative regulation of transcription
  Homolog annotation: Hit_ID=Q8W305; Match level="QueryCoverage=71%, HitCoverage=28%, E-value=8e-29, Identity=78%"; Hit description =Putative reductase
MFALIFGPTIILPPKESTYNFYSLSWMTITQLAHHGMLFVPIGFTFGSGMVDMDGIRGGSPYGAGVFAGDGSRQPSETELALAEHHGKYMASIVKKLALHA

SEQ ID NO: 83171 - protein, 126 aa, Zea mays
  Coding DNA Sequence Number=SeqID_41392
  Homolog annotation: Hit_ID=Q6ZGC2; Match level="QueryCoverage=44%, HitCoverage=5%, E-value=3e-17, Identity=77%"; Hit description =Putative isoleucyl-tRNA synthetase
MDGIRGVSEEATPIARGYLLAMAADNLVRLNLPLQSTRASEKQEDGKYKHTVDLLKTTFELRANSVQRELELQKLWDDNQVLKRVSERNTGVAQHVGPSPGLGHPAGSVASADNKAYFLWNQPDNI

SEQ ID NO: 83172 - protein, 109 aa, Zea mays
  Coding DNA Sequence Number=SeqID_41393
  Subcellular localization annotation: CTP_CleavageSite=57; ConfidenceScore=5.26e-01
MSKNTRDTRFIPRFGHTTKVPYFLVEAPTKSRVSLNPNPSFVDHKDKNRLSVPLNVRLNQFFQKGEQCKNRLNLFFQKAILAKIDLKRLYYILSLRINNGKMEVLDQGF

SEQ ID NO: 83173 - protein, 75 aa, Zea mays
  Coding DNA Sequence Number=SeqID_41394
  Subcellular localization annotation: CTP_CleavageSite=26; ConfidenceScore=5.10e-01
MSKNTRDTRFIPRFGHTTKVPYFLVEAPTKSRVSFNPNPYFVDHKDKNRLSVRLSVRLNQFFQKGEQCKNRLNLF

SEQ ID NO: 83174 - protein, 134 aa, Zea mays
  Coding DNA Sequence Number=SeqID_41395
  Homolog annotation: Hit_ID=O24587; Match level="QueryCoverage=32%, HitCoverage=4%, E-value=5e-13, Identity=77%"; Hit description=Pol
  Subcellular localization annotation: CTP_CleavageSite=32; ConfidenceScore=5.38e-01
MPAFLSPRAARPFLPHPHAKLSSRRSSSSAVRPMSRWPFGIRRGGDENDGFGIDSDDGKWYSFRLERLCNCCVRELLILARTWFTFGLPSKTGCDIYHIRIENELADIFTKPLDEKTFCRLRSELNVLDSRNLD

SEQ ID NO: 83175 - protein, 94 aa, Zea mays
  Coding DNA Sequence Number=SeqID_41396
MAMQYRGDENGGFGIDSGDGKCYSFRLERVVSIATTAQEKLKPWKETSRSSKITTSSRRGLAATPSRLPVKAACIYVSFSNFDYCKDYVDVSDI

SEQ ID NO: 83176 - protein, 236 aa, Zea mays
  Coding DNA Sequence Number=SeqID_41397
  Homolog annotation: Hit_ID=Q6QP51; Match level="QueryCoverage=41%, HitCoverage=50%, E-value=6e-13, Identity=43%"; Hit description =Putative growth-regulating factor 1
TGGVFGRRSGRRFAFAIMTASKKGPEKGDTPKRILPREGTRPRASLLIRGSKAGPSEGFDSRLRSRGPYTHYWSEVRRPAPRKGSTTASGYSGSAPTTDQGFEGWPPKGGNDLVTESHQREASSPRTPSPGDRVRQITRSSPETPCSVPIEGNMALSPLLLAERRRRGVCKKAESVPDHPLALCRGSGAALANPAPAEPLTASTYQPENLGPDRTPGLRSARMRERPDQPKRYARH

SEQ ID NO: 83177 - protein, 178 aa, Zea mays
  Coding DNA Sequence Number=SeqID_41398
MNKTPALKVPLQTELRFRPRGYEHPPTLEGPRGDKAPGRPPSPAPAAATTTSAPGGRTAAAMASGRTPLQQCPRPHLRSRGEDKYKEPEVRSADGGGDPARDPTVPARRIGHGPVSLGRRRDGRCGQKWAGSNGGGRRAEAAVTSSAKLTSPHGTVREPSPTEKRATLRLRHNDRVKN

SEQ ID NO: 83178 - protein, 95 aa, Zea mays
  Coding DNA Sequence Number=SeqID_41399
  Subcellular localization annotation: CTP_CleavageSite=22; ConfidenceScore=5.17e-01
MAFSDDGKMKPNLFRTRGNRCIAMTNNGVEKKNKRSSNRRCAKKYPTFFNTNCMSSYFQLEYKAEGLMNFVAPVHNFSETYVKVDYELGYNVHLH

SEQ ID NO: 83179 - protein, 183 aa, Zea mays
  Coding DNA Sequence Number=SeqID_41400
  Homolog annotation: Hit_ID=Q60EF6; Match level="QueryCoverage=32%, HitCoverage=17%, E-value=8e-10, Identity=56%"; Hit description =Putative TGF-beta receptor interacting protein
MEESGFAITSINGRINRAVWGPLIRTIVTAREDATIRIWDSEEAQEDEERERVCQKQGHQREGDHGGVVDAELDFGKKLPSFFFIQKRMAFSDDGKMKPNLFRTRGNRCIAMTNNGVEKKNKRSSNRRCAKKYPTFFNTNCMSSYFQLEYKAEGLMNFVAPVHNFSETYVKVDYELGYNVHLH

SEQ ID NO: 83180 - protein, 160 aa, Zea mays
  Coding DNA Sequence Number=SeqID_41401
  Gene Ontology: Cellular component=coated vesicle membrane; Biological process=intracellular protein transport
  Homolog annotation: Hit_ID=Q8LSP1; Match level="QueryCoverage=58%, HitCoverage=42%, E-value=1e-25, Identity=62%"; Hit description =Putative clathrin coat assembly protein
  Pfam annotation: Domain name=Clat_adaptor_s; Domain location=22-132; Score=25.5; E_value=2.4e-09; Accession=PF01217.10; Description =Clathrin adaptor complex small chain
  Subcellular localization annotation: CTP_CleavageSite=41; ConfidenceScore=5.24e-01
MDKKQIGLKGKAKSPKQSYNSFKHAPAPEVTSLVSVLQSLMSAAIPNVIGWIAISFAKGTKMVYKHLATLYFVFVFDSFENELAMLDLVQVFVETLDRCFKNVCELDIIFNFNKAAKKVGHRSCITIFDSSWVICFKLRLFMHMPYAVLCKSESLSITNA

SEQ ID NO: 83181 - protein, 283 aa, Zea mays
  Coding DNA Sequence Number=SeqID_41402
  Homolog annotation: Hit_ID=P53443; Match level="QueryCoverage=44%, HitCoverage=18%, E-value=5e-47, Identity=75%"; Hit description =Phenylalanine ammonia-lyase
  Pfam annotation: Domain name=PAL; Domain location=4-233; Score= -244.5; E_value=0.00059; Accession=PF00221.9; Description =Phenylalanine and histidine ammonia-lyase
MPCKPRKPSREFPCPKEGLAMVNGTAVGSGLASTVLFEANILAILAEVLSAVFCEVMNGKPEYIDHLTHKLKHHPGHIEAAAIMEHILEGNSFMKLAKKLGELDPLMKPKQDQSKTNLQQIGLKGKAKSPKQPYNSFKHAPAPEAIPNVIGWIAISFAKGTKMVYKHLATLYFVFVFDSSENELAMLDLVQEMEESGFAITSINGRINMAVWGPLNRTIVTARVDATIRIWDSELDFGKKLPSFFFIQKRMAFSDDGKMKSWSWPHGLMAERPSFVEFLEAYL

SEQ ID NO: 83182 - protein, 55 aa, Zea mays
  Coding DNA Sequence Number=SeqID_41403
MASRGCSPATSASSRSECRRNGVLSVAEVVGSTAGRDLNLIRARQSKINTPESRS

SEQ ID NO: 83183 - protein, 293 aa, Zea mays
  Coding DNA Sequence Number=SeqID_41404
  Gene Ontology: Biological process=electron transport
  Homolog annotation: Hit_ID=Q10I64; Match level="QueryCoverage=45%, HitCoverage=20%, E-value=2e-51, Identity=80%"; Hit description=FAD -binding domain-containing protein, putative, expressed
MARQQPERVSPQRRPVSCGGGWKRDGVCGSPPLSGGLFAAATSASSQSECHRSGVLSVVEVHRLRDLEPRALCGVELYDGILMRYVKASTAYLGKPAPRGEPSGDMVDFDITYYRSCDPGQARLFEDVLEEVEQMGIFKYGGLPHWRKNCNLAFVGAARKYPGLSRASTPACRASCVSRTPTTPMASSPAVATSAAASCTHWSCSWSTTSVSGASVAGGARTEESGSRTRRSAAARSLGTSGATASRGCSPATSASSRSECRRSGVLSVAEVVGSAAGFAGGRAGGCRGGLHR

SEQ ID NO: 83184 - protein, 66 aa, Zea mays
  Coding DNA Sequence Number=SeqID_41405
MTFVAVDECGARKGDVVKGVGPVGRRTAAPKVVAAVHVADRVMPPGTAVFVNGLCPLLPIRERGGI

SEQ ID NO: 83185 - protein, 711 aa, Zea mays
  Coding DNA Sequence Number=SeqID_41406
  Gene Ontology: Mol. function=arsenite transporter activity; Cellular component=integral to membrane; Biological process=citrate transport
  Homolog annotation: Hit_ID=Q6K6Z6; Match level="QueryCoverage=72%, HitCoverage=98%, E-value=1e-161, Identity=60%"; Hit description =Putative arsenite transport subunit B
  Pfam annotation: Domain name=ArsB; Domain location=14-413; Score= -217.5; E_value=0.038; Accession=PF02040.6; Description=Arsenical pump membrane protein
  Pfam annotation: Domain name=CitMHS; Domain location=16-473; Score =356.8; E_value=3.5e-104; Accession=PF03600.6; Description=Citrate transporter
  Pfam annotation: Domain name=DctM; Domain location=13-524; Score= -226.5; E_value=0.018; Accession=PF06808.2; Description=DctM-like transporters
  Pfam module annotation: Pfam domain module=ArsB::CitMHS::DctM; Domain location=14-413::16-473::13-524
  Subcellular localization annotation: CTP_CleavageSite=52; ConfidenceScore=5.09e-01
MAMDPVLKVALGSAAFAVFWVLAVFPAVPFLPIGRTAGSLLGAMLMVLLGVMSADDAYAAVDLPILGLLFGTMVVSVYLERADMFRHLGRLLSWRSQGGRDLLVRTCAVSALASALFTNDTCCVVLTEFILKIARQNNLPPRPFLLALASSANIGSAATPIGNPQNLVIAVQSGISFGGFVFGILPATLVGSVVNAAILLALYWNQLDGGCKPAAGAQEVVAVPTEVVEEEDVTSHRFSPATMSHLLLRRAQSQQVPAGYDDAANQDPVKPPNGVHHRRKAAVNGDCDGDGDRYYSSFSSTSSSTEEASAKQPEDDEEEVEEEWQSRVWKMCVYVITLGMLVALLLGLNMSWSAITAALALIVLDFKDARPCLEKVSYPLLLFFCGMFITVDGFNKTGIPSAFWDFMEPYARIDTPTGTAVLALVILLLSNVASNVPTVLLLGARVAASAAAISPAAETNAWLILAWTSTVAGNLSLLGSAANLIVCEQARRSQQYGYTLSFFSHLQFGFPATLVVTGHRPAAHQNLLMRTGRDVWRGKKNVDSFSAPCIASQHVLVQAHETGHARTSVRVRVCAAFSPSPLLSRGDSDEPTTVRPSLPLYSPVARIFFVPLEIDGHNQVPFGLLYLLCGTEHSKPNLLFVFGSDLIATVYAWQTGSFARMPWCTIDESDPGVFTELIQQMQVEGVQGRRKIAAGGLDLAPGRDPVGEERS

SEQ ID NO: 83186 - protein, 161 aa, Zea mays
  Coding DNA Sequence Number=SeqID_41407
  Subcellular localization annotation: CTP_CleavageSite=69; ConfidenceScore=5.42e-01
MKMLPFAPGLRHLTTLRSRSSSPRFTNGGKMTGAAPPFDLHTARRRTNDEVSPSHVLTRPGGPLKAALLAEKKGKAPTDNTHQEAGEAEALSKRQCNDQHTPEGTLRTCSSGGQPQAPPPGFAPLEGEDATEDGEVIDVSAEEQLQLRALHLKNRNLQKQK

SEQ ID NO: 83187 - protein, 70 aa, Zea mays
  Coding DNA Sequence Number=SeqID_41408
MAIALFIRPLKGTVRGVEVEGRAAPVILLPLVKRGDEDLERRVASSSSPQHSRYWSEGWRLRLRPNMIIL

SEQ ID NO: 83188 - protein, 233 aa, Zea mays
  Coding DNA Sequence Number=SeqID_41409
MFGLQVAMRLMVLGFDSSNASPLQPNRILAEYVDVYSPLLYTPTPLPQVVNIATTAQEKMKSWKETSRSSKTTTSSRRGWLVLDTPPGSLSSPSYPLVSRSVRFAVPWPEIESVRSCFPVLPLEAPPAPPLGAPAPGVAAGGDPDDGGGDDSSSHDTDFSADQEPEGWVARPITRNAARGCHFHDALDTLLRRALDRRTWSIEYRCVVYQHSRGVYPDHWEATCLVRRPENSL

SEQ ID NO: 83189 - protein, 245 aa, Zea mays
  Coding DNA Sequence Number=SeqID_41410
MAARSPCPAPARRRATVVAMRLMVLGFDSSNASPLQPNRILAEYVDVYSPLLYTPTPLPQVVNIATTAQEKMKSWKETSRSSKTTTSSRRGWLVLDTPPGSLSSPSYPLVSRSVRFAVPWPEIESVRSCFPVLPLEAPPAPPLGAPAPGVAAGGDPDDGGGDDSSSHDTDFSADQEPEGWVARPITRNAARGCHFHDALDTLLRRALDRRTWSIEYRCVVYQHSRGVYPDHWEATCLVRRPENSL

SEQ ID NO: 83190 - protein, 72 aa, Zea mays
  Coding DNA Sequence Number=SeqID_41411
MWDPDSGTVPLAPSLPLTATDRGELAAGNLSRSPTYGDPGLVFWRLSLSARATVAWAESLGPPPQQNRGRSL

SEQ ID NO: 83191 - protein, 102 aa, Zea mays
  Coding DNA Sequence Number=SeqID_41412
MATRRRSTGNARDSVGEEALTTRPMRRWHALKVTDAKRLTRGPHMSVWLDSYYSFNEFDLLLFESSSRLGTRDVIVDITPQPITLNQRSKSDKYHKNKHSST

SEQ ID NO: 83192 - protein, 113 aa, Zea mays
  Coding DNA Sequence Number=SeqID_41413
  Gene Ontology: Mol. function=hydrolase activity; Cellular component =chloroplast
  Homolog annotation: Hit_ID=Q10Q09; Match level="QueryCoverage=98%, HitCoverage=29%, E-value=1e-45, Identity=62%"; Hit description =Diphosphonucleotide phosphatase 1, putative, expressed
MTLSLVHLTQQTSSYANGYLSQWDQFTAQVEPIASTVPYMVGSGSHKRDWPGSGSFYGNLDSGGECGVPAQNMFYMPAENCEHRVLGYSSATFYADEGTTEEPMGRECLQPLW

SEQ ID NO: 83193 - protein, 164 aa, Zea mays
  Coding DNA Sequence Number=SeqID_41414
  Gene Ontology: Mol. function=hydrolase activity; Cellular component =chloroplast
  Homolog annotation: Hit_ID=Q10Q09; Match level="QueryCoverage=98%, HitCoverage=29%, E-value=5e-82, Identity=89%"; Hit description =Diphosphonucleotide phosphatase 1, putative, expressed
MTLSLVHLTQQTSSYANGYLSQWDQFTAQVEPIASTVPYMVGSGSHKRDWPGSGSFYGNLDSGGECGVPAQNMFYMPAENCEQFWYSTDYGMFRFCVANTKLDWRPATEQYRFIKHFLSSVDRQKQPWLIFLAHRVLGYSSATFYADEGTTEEPMGRECLQPLW

SEQ ID NO: 83194 - protein, 169 aa, Zea mays
  Coding DNA Sequence Number=SeqID_41415
MAVWRFDRWFRRRWGNAYNRGAVTCFACGGMITSLVVGRSKSGCGLCPALSFKDGRRASSSPAEEASSSHAGEGKLLLPGQGAAAHPPPGRRSCRAQVAAVAGAEVVAATGEASHRSGGCFRRQDRSATCAPDLRLFGFNGWFSSPVRDVNEALSVTPGFQGTKTRART

SEQ ID NO: 83195 - protein, 77 aa, Zea mays
  Coding DNA Sequence Number=SeqID_41416
MRGKANCCCLVRVQLPILHPGDGHAVRRWLLSPGLKWWPPLVRLPTAAVVASVDKTVVPPALRTSGSLALMVGSRPL

SEQ ID NO: 83196 - protein, 121 aa, Zea mays
  Coding DNA Sequence Number=SeqID_41417
MFAECLTLGKAVFAECGAQQSLLCRVPDKKHSAKPPALGKGPDSDGWCKKTHKVYPSTGNRRPYIQWGNETCIILHLSARSRGYKQVERGRDVSEPCSSMAGEMALVLVVVFGYEKDARYL

SEQ ID NO: 83197 - protein, 220 aa, Zea mays
  Coding DNA Sequence Number=SeqID_41418
MARGWRGGDGEGLARRRADGAAASRRRRTDGSERVREKEGERFSAGDFAECGARQSLLCRVPDKKHSAKPPALGKEPNSGSVEDDTTASPLPPPGGSRQKEATASLTFLSSFSSTFLHPCLACLVAGTSPDHQLRCPIWSITSMPDPVPHVESLSWQLTRCTTTLLKRRAHGTTARVCDSTIGRRGRWLWILGRVSPIIPHSPPPPFSLGVTSLVASMTP

SEQ ID NO: 83198 - protein, 80 aa, Zea mays
  Coding DNA Sequence Number=SeqID_41419
MARGWRGGDGEGLARRRADGAAANRRRRADGSERVREKEGERSLETWKTVNAKIISILLSTSYDRFQDRTGNFEHHANST

SEQ ID NO: 83199 - protein, 173 aa, Zea mays
  Coding DNA Sequence Number=SeqID_41420
  Subcellular localization annotation: CTP_CleavageSite=91; ConfidenceScore=5.42e-01
IAGTRQRTDITPRGEPFSFLLSHSLTAIRAPPSTRRRAVRPPPRQPLVVTAAPAPRHSSAHRARRHCRTCRPRPTVLAVTAVLVTAAPTVLAVTAAAPCSPSPPPCSPCPRPLCSSCPLPAALAVPAPAVLAVPLVVPLATAARPRVPSSPPREDVYPENSGEVLPKFYLGSE

SEQ ID NO: 83200 - protein, 355 aa, Zea mays
  Coding DNA Sequence Number=SeqID_41421
MACRTRLNTLHVTEKDCQALVALVNGTHCNIHTTQHREWNGSETSVRRGVKTEVVKKGAFNREAFNCWGEKIMIARRSKSKRLQWPPFSRSGERYPLPYLAALFSLTPDAGDDCSRPLASFARTEPPVPDTGNFSLHLATPRPVRGRAILRGDAAADLPSVGGVGPGPARLRRRRSRLRDHAVPLATEDEEGSNPLLPRFLATDWLASVSDHRLLHQIHTETLRFGVLRARSSLLEIRTCSLSCELVTLFILRFSPPHLIMASSTEDKMKALMKVLVDCAEDATKSLGGLVDHALDHMHDEEILARTLFAMKEKLELLQQDALEAKVQAFPEIAKYEWDDISVEPPSPSPPPNSY

SEQ ID NO: 83201 - protein, 205 aa, Zea mays
  Coding DNA Sequence Number=SeqID_41422
  Homolog annotation: Hit_ID=Q6K8D7; Match level="QueryCoverage=26%, HitCoverage=39%, E-value=2e-18, Identity=87%"; Hit description=DNAJ heat shock N-terminal domain-containing protein-like
  Pfam annotation: Domain name=DnaJ; Domain location=149-205; Score =56.1; E_value=1.2e-13; Accession=PF00226.21; Description=DnaJ domain
MKALMKVLVDCAEDATKSLGGLVDHALDHMHDEEILARTLFAMKEKLELLQQDALEAKVQAFLEIAKYEWDDISVEPPSPSPPPTVTDPSIDEEEFYCPDVSDEWYFSDSDRALSSKWDKIRADVSKFSGYYARVLREKQSGLTDDDKDYYKILEVDYYASEETIRSSYIRLALKWHPDKKQGQGEENSTSKFQEINEAYQGELD

SEQ ID NO: 83202 - protein, 112 aa, Zea mays
  Coding DNA Sequence Number=SeqID_41423
MRVIWDALGQVIREVLCWVLVFGHWETEASVMAPIFSLRDLGTGIVPRLFLRAELRAALGSSLIRDTDDLRFNGSIYGFGSMMIMMFLDEEMVHGLVTARTWLPLKNKYLTN

SEQ ID NO: 83203 - protein, 54 aa, Zea mays
  Coding DNA Sequence Number=SeqID_41424
MRVIWDALGQVIREVLCWVLVFGHWETEASVMARIFSLRDLGTGIVPRLFVRAE

SEQ ID NO: 83204 - protein, 90 aa, Zea mays
  Coding DNA Sequence Number=SeqID_41425
MRVVWDALGQVIREVLCWVLVFGHWETEACVMAPIFSLRDLGTGIAHGFFLMAEKGNHGSWVKCATSAECYETDISAVLTVMSGLGILFD

SEQ ID NO: 83205 - protein, 88 aa, Zea mays
  Coding DNA Sequence Number=SeqID_41426
MRVIWDALGQVIREVLCWVLVFGHWETEASVMAPIFSLRDLGTGIVPRLFLRAESCVRCSFPLALCFFVNFNCKGERLQVVEIPRKRD

SEQ ID NO: 83206 - protein, 72 aa, Zea mays
  Coding DNA Sequence Number=SeqID_41427
MEGKPSRERKSELKRVSPPLAGVGEFIYGRESKKLQLSTVYDLLELDKVNFTYVRPLGGILGKLGQTLAKVL

SEQ ID NO: 83207 - protein, 78 aa, Zea mays
  Coding DNA Sequence Number=SeqID_41428
MGDTVSGRMRDKVCARLHSDKVNFTYVRPLGGILGKLGQTSSKWLGTGVCFLVSKFEDQKVNSFLWTKLLNSRAEGVL

SEQ ID NO: 83208 - protein, 85 aa, Zea mays
  Coding DNA Sequence Number=SeqID_41429
MRIKAKRAEGTRWRAGNCANTTWNDAPPGRAEGSTDQGQRSRDDQPKHHRQAQVDALGTKGAKRCWAVRRSELSREMNAAKELRE

SEQ ID NO: 83209 - protein, 249 aa, Zea mays
  Coding DNA Sequence Number=SeqID_41430
MQRLRARAEAKCWRAGSRDDQPKHHRQAQVDALGTKGAKRCWAVRRSELSREMNAAKELREQSAAQRSTGGTRSLGRETSMELHTRPWKRGIRVGATACAQQRTKKPGTELRELAMEQRHTVRRFKGRAGTQTRDAEGDGRASRGARTRGAREIRDSRVLGVRSSREEHRTGGIAAGIKLSREERREGAAMGDVRRAGGGREGKQRRGWRSPAGHHGSSSGSERSSEERESTTGYLKNPRGGAEKKSAG

SEQ ID NO: 83210 - protein, 263 aa, Zea mays
  Coding DNA Sequence Number=SeqID_41431
  Homolog annotation: Hit_ID=Q6QP51; Match level="QueryCoverage=31%, HitCoverage=37%, E-value=4e-29, Identity=79%"; Hit description =Putative growth-regulating factor 1
MSCNRRAGYDVREVTLSLAPMLRLLDCGTSTATRGSPAHDPTVPVKGDGHGPVSHEVGTTVGMVKSGPAVTAAADERRRVSTAAPEHSDFKPITDQGFEGWAPGRVRQPPQSARALCPLLIRGSQAGPSEGFDSRPRARRVRDDSGYVRYIAEARATLPRYPRTFLRPAGTICNGIPPEGGIEPSDPVEGVWVQQITRRYFWSAPLGHQPTPNERGTGVHSDHPLAAHWKHHVRRPPRATWRFPPSSLRKGDAGAYNKSRESP

SEQ ID NO: 83211 - protein, 263 aa, Zea mays
  Coding DNA Sequence Number=SeqID_41432
  Homolog annotation: Hit_ID=Q6QP51; Match level="QueryCoverage=31%, HitCoverage=37%, E-value=8e-31, Identity=81%"; Hit description =Putative growth-regulating factor 1
MSCNRRAGYDVREVTLSLAPMLRLLDCGTSTATRGSPAHDPTVPVKGDGHGPVSHEVGTTVGMVKSGPAVTAAADERRRVSTAAPEHSDFKPITDQGFEGWPLGRVRQPPQSARALCPLLIRGSQAGPSEGFDSRPRARRVRDDSGYVRYIAEARATLPRYPRTFLRPAGTICNGIPPEGGIEPSDPVEGVWVQQITRRYFWSAPLGHQPTPNERGTGVHSDHPLAAHWKHHVRRPPRATWRFPPSSLRKGDAGAYNKSRESP

SEQ ID NO: 83212 - protein, 163 aa, Zea mays
  Coding DNA Sequence Number=SeqID_41433
MKGNDDVVAHSTKANNNDMGSAGCGRIRSELHFDDHQIDIGTRRTRTIDMLWSKPLAEHQPMLERTARELRSSTRPWSSELYGADCFAAKTVVAKCTTSPCHNTTTAMNKGAHRELETERSEMDRTELGRSVRAQGSRDAQRLIPTSTAGVRPWAKYQRADNA

SEQ ID NO: 83213 - protein, 180 aa, Zea mays
  Coding DNA Sequence Number=SeqID_41434
  Subcellular localization annotation: CTP_CleavageSite=56; ConfidenceScore=5.49e-01
MASAWRPAHRALDPPSSDLPLPWRPALLAPGAACRFTCSASMAPSRVAPPRASLCSLALRGARSLLHSSFGAFPSSLARLPPCLGSLLVRSPKSPMAAHDVLVDVVLVRISLCASLLPCARTLLPSSALSISPRSVSSSLSTPLRARQPPLPCHRTPNAVIHGRDLAKCIRRLALCRLAR

SEQ ID NO: 83214 - protein, 257 aa, Zea mays
  Coding DNA Sequence Number=SeqID_41435
MADLEVGLIWPEEVGRRLPAGRWRSFAAGLPPVSSGRAVEVGEGCIVFAAGEETARLTQLLAGLTEREREEGDGLTGEGKDDGASRLGLGRGEEGGGRGWCEEEGARGELFIGARGRGERWSSLTPASFPVPPLMAHSAAEGTLRRGSTGEDAGQGEEDGAVPNFPVRRGDGDEETAVKDGGEGTAGVVCGEDDEAADRWDRSASERGPRARERGGALTGGVGLSAGRSGARFGPPGPEREGREAGARELGWKSAQP

SEQ ID NO: 83215 - protein, 82 aa, Zea mays
  Coding DNA Sequence Number=SeqID_41436
  Homolog annotation: Hit_ID=Q93YY0; Match level="QueryCoverage=40%, HitCoverage=5%, E-value=9e-12, Identity=91%"; Hit description=68 kDa protein HP68
  Pfam annotation: Domain name=RLI; Domain location=6-37; Score=40.3; E_ value=6.7e-09; Accession=PF04068.5; Description=Possible metal -binding domain in RNase L inhibitor, RLI
MAERLTRIAIVSEDKCKPKKCRQECKKSCPIAKTEFHEESDDIRGDQQEFWEEDGNVLHKTTNKGKSWVHYKAVAANLYPVK

SEQ ID NO: 83216 - protein, 167 aa, Zea mays
  Coding DNA Sequence Number=SeqID_41437
  Pfam annotation: Domain name=RLI; Domain location=136-162; Score =18.9; E_value=0.0033; Accession=PF04068.5; Description=Possible metal-binding domain in RNase L inhibitor, RLI
MDDCTGSTPHSEGESRLSVLAHATEADRLRYAKSRNPRPLWKAIGISVRVRYAKSRNPRPKSRNPPSAMEGRSPGRHHRPCPLRPRFSVLRPRVAHEEMAEPRVWSASHSHRYALAASLAPLRSLPFAGGVGRDGRAFDKCKPKKCRQECKKSCPVAKPGKIPTPAP

SEQ ID NO: 83217 - protein, 141 aa, Zea mays
  Coding DNA Sequence Number=SeqID_41438
MHRALPPFEPPDGVLQHRLALAVVGGAQPHGDRHLSAIARLQGFLSCSPAAFPQQWAVWWGEASRAAASAPPLASRIFIIRAEAEERTEWGLPPRGPPPKVEVVVSAAVEVVGKPLGVCHPAGPLVWRLFIPAGAEPESRL

SEQ ID NO: 83218 - protein, 368 aa, Zea mays
  Coding DNA Sequence Number=SeqID_41439
QLSPEDTSPAHGLGSLTPGLVPPVDDLARSQPPLLCLLGLGKQPRVPSLSKRSLERQGRPSQGTPTPLGYGYLTRHLPHRATHTWLSDPASRQASPGARNGEETLLYAQIHRCSGPDSRNEHTPALKVPLQTGLRFRSRGYEQPPYQEARGTTNSKRHTAAHSCSSNNDLRPGRQDSCSNGFGANAAVEKLSPTKDENQPFKPGRQRSRGAGGVGDLVGGETFSGCCHHSTDGDVHLSANTASASAGCPKAHRQVLTPALAEAAPEHEHRPRGVRRSGQPSGVAVGARKTWTWPARTRRDRRPGEGRNAAPYLGSSSSPSPAWLKEASVGPEDAFLPQTLGEEKGYRPTWRQPPLGALLRLSPDDENP

SEQ ID NO: 83219 - protein, 282 aa, Zea mays
  Coding DNA Sequence Number=SeqID_41440
  Subcellular localization annotation: CTP_CleavageSite=63; ConfidenceScore=5.10e-01
MAQSTVGSLRAVDAPDMSGAHWTVRCPLLAVGSATCPAQISRPTVGPADSWLTGQSGAHRIVRGSSRRARAAARIGSSGEAGSRGRQRPTAGEEEDATGSARGKEKGGWGPAADGGELEEEVAKVGDGAEDAEGPGAAGSQRGEVERSGIRHRAATVRWCRGTYGRSGLGAGARLWLGLGTQELRVGGRAGVAPRHGSRLLASCVGQHDRGAGALGWPGSALGAGGGSVVPGAARVEAIGRAGRRVLRLREGRREEEPGAGVAVAREQIGGADGTGEGSTGG

SEQ ID NO: 83220 - protein, 202 aa, Zea mays
  Coding DNA Sequence Number=SeqID_41441
  Subcellular localization annotation: CTP_CleavageSite=63; ConfidenceScore=5.10e-01
MAQSTVGSLRAVDAPDMSGAHWTVRCPLLAVGSATCPAQISRPTVGPADSWLTGQSGAHRIVRGSSRRARAAARIGSSGEAGSRGRQRPTAGEEEDATGSARGKEKGGWGPAADGGELEEEVAKVGDGAEDAEGPGAAGSQRGEVERSGIRHRAATVGGAGPAERARGGRLRRAAMEAAGGAGARLKRPVAAEWGGSRRRGG

SEQ ID NO: 83221 - protein, 106 aa, Zea mays
  Coding DNA Sequence Number=SeqID_41442
  Subcellular localization annotation: CTP_CleavageSite=71; ConfidenceScore=5.50e-01
MSKNTRDTRFIPRFGHTTKVPYFLVEAPTKSRVSFNPNPPFANHRGRTRFTDLLSRRVDRTQNRLSRAQIRLNRFSQNLHTTFSDRTDWQTGSDRAEQCRNRLNRF

SEQ ID NO: 83222 - protein, 106 aa, Zea mays
  Coding DNA Sequence Number=SeqID_41443
  Subcellular localization annotation: CTP_CleavageSite=71; ConfidenceScore=5.41e-01
MSKNTRDTIFIPRFGHTTKVPYFLVEAPTKSRVSFNPSPPFADHKGRTRFTDLLSRRVNRTQNRLSRAQIRLNRFSQNLHTTFSDRTDWQTGSDRAEQCRNRLNRF

SEQ ID NO: 83223 - protein, 132 aa, Zea mays
  Coding DNA Sequence Number=SeqID_41444
  Subcellular localization annotation: CTP_CleavageSite=49; ConfidenceScore=5.35e-01
MEARRTVSISFLRRSWSSSPDARVPAPRSKAGRRVCSPRLCGHAPVPVTAGEARNLKNRVKTKLAARYSLNARQIAWIGKSLPISRIRVSCGNGTLINRVLRKTSQVDPKRGLFRRMMLMDKPEDGRKVDAG

SEQ ID NO: 83224 - protein, 119 aa, Zea mays
  Coding DNA Sequence Number=SeqID_41445
  Subcellular localization annotation: CTP_CleavageSite=53; ConfidenceScore=5.62e-01
MAGAPCLVPSVAPSPYCSPVCAPLRPWSPSTVDPLAQAASSYPRLQSKVVVARASPRKPKNRVKTKLAARYSLSARQIDWIGKSLNGAIINHVMRKMTQVDPKRGLIRRMKLMDQPEDG

SEQ ID NO: 83225 - protein, 78 aa, Zea mays
  Coding DNA Sequence Number=SeqID_41446
MKKIDEEVQQQTDQVLKVADKWFLSHFRVDCHRKAVQEREINTEYMLAVLQQLPTIGDARTTLRYNSPDCPVCQRSNG

SEQ ID NO: 83226 - protein, 122 aa, Zea mays
  Coding DNA Sequence Number=SeqID_41447
MADSKDFNGASPNSNTRLTNLSTAEHERLKDDMKKIDEEVQQQTDQVLKVADKWFLSHFRVDCHRKAVQEREINTEYMLAVLQQLPTIGDARRRKNCAKHIGNKWVLKGNRVKPFPINDFGD

SEQ ID NO: 83227 - protein, 80 aa, Zea mays
  Coding DNA Sequence Number=SeqID_41448
MAIARQVANSGEAIWTGREASGYCGQPMVSSAVKIFSPRGVIRTPVGTNRIAGANPGAGVAGGKLYKFAILTKSKVLKNS

SEQ ID NO: 83228 - protein, 66 aa, Zea mays
  Coding DNA Sequence Number=SeqID_41449
MEMLKLRLGLGTGDVLPRLKHTLESLFLSRVRKRQIFVAFAPRWYQMRKNKTEVREDSVLHLGSFA

SEQ ID NO: 83229 - protein, 89 aa, Zea mays
  Coding DNA Sequence Number=SeqID_41450
MEIFKLRLGLGTGDVLPRLKHTLESLFLSRVRKRQIFVAFAPRWYQMRKNKTEVREDLVLHIGSFAYNLSGGVCASLGLYNITIQHSPF

SEQ ID NO: 83230 - protein, 227 aa, Zea mays
  Coding DNA Sequence Number=SeqID_41451
  Homolog annotation: Hit_ID=Q6QP54; Match level="QueryCoverage=39%, HitCoverage=28%, E-value=3e-10, Identity=48%"; Hit description =Putative kinase
MHTLESLFLSRVRKRQIFVAFAPRWYQMRKNKTEVREDSVLHLRSFAYNLSGGVCASLGLYNITTLHSLLALHGRSEPEVGRGGGSSEVEAEFEPWGRARRRPSSEVEVASEPWGRVRRRPSSEVEVESEPWGRARRRPSSGVEVESEPWGRARRRPSSEIEVESEPWGWARRRPSSGVEVESEPWGRVRRSFLWRPRLDLAAIGLTLASGTTVGAAQVALFSCQVC

SEQ ID NO: 83231 - protein, 227 aa, Zea mays; identical to SEQ ID NO: 83230
  Coding DNA Sequence Number=SeqID_41452
  Homolog annotation: Hit_ID=Q6QP54; Match level="QueryCoverage=39%, HitCoverage=28%, E-value=3e-10, Identity=48%"; Hit description =Putative kinase

SEQ ID NO: 83232 - protein, 85 aa, Zea mays
  Coding DNA Sequence Number=SeqID_41453
MGNRERWTCDSSRRSRFWLRNERGSAEGFMLGDEESEPGCFNRLAIPAGTTLTATTGEEGGSDREAPPKSTEALAGKCFSYAAHK

SEQ ID NO: 83233 - protein, 353 aa, Zea mays
  Coding DNA Sequence Number=SeqID_41454
MRLILRYLFLTCGGCETARVSSHTIIAQQVVGNNVHELAKGGSSREVGCTSLPTSHVTHLPRDRDFPYTSSEEARQGFLPDRHRSKINQGPPYTDHSPTALAPFGYQDDLQVTRVLTAKRSNIDKHAAQSTSDGQDPIVPNAQTVPGGGVKPPHPMERRRGNGAQSLSHGVGSESREGARALEMAPRAASCRRSAPARSRRWMHRCGGGSQHGRQAESGSRDATGELGHWRELAMGNRERWTCDSSRGRRRSRFWLHNERGFAEGFMLGDEESGPGCFNRAALESRSFGGGRCGSSGEQARKDLNSGKGERLFAGLFTVTLAAQWTVVSSSEFAVDCSHPTCLEDLPCRIRYP

SEQ ID NO: 83234 - protein, 95 aa, Zea mays
  Coding DNA Sequence Number=SeqID_41455
  Subcellular localization annotation: CTP_CleavageSite=38; ConfidenceScore=5.01e-01
MVLLQLNFMQSLPLMILMFQMGSLMLGVGRGRPERGHLASSYSSGSGRLDTSIVPKSLPCGLDYKLVTHLRNEDSREKPRSETLAIHLGSEYGSS

SEQ ID NO: 83235 - protein, 75 aa, Zea mays
  Coding DNA Sequence Number=SeqID_41456
MGSLMLGAGRGRPERGHLASSYSSGSGRLDTGIVPKALPCSLDYKLVTHLRNEDSREKPRSETLAIHLGSEYGSS

SEQ ID NO: 83236 - protein, 49 aa, Zea mays
  Coding DNA Sequence Number=SeqID_41457
MVDRNGDIWQALIVPAQFDHFQHLRNEDSWEKPRSETLAIHLGSEYGSS

SEQ ID NO: 83237 - protein, 75 aa, Zea mays
  Coding DNA Sequence Number=SeqID_41458
MGSLMLGAGRGRQERGHLASSYSSGSGRLDTGIVPKALPCSLDYKLVTHLRNEDSREKPRSETLTIHLGSEYGSS

SEQ ID NO: 83238 - protein, 75 aa, Zea mays
  Coding DNA Sequence Number=SeqID_41459
MGSLMLGAGRGRQERGHLASSYSSGSGRLDTGIVPKALPCSLDYKLVTHLRNEDSREKPRSETLAIHLGSEYGSS

SEQ ID NO: 83239 - protein, 63 aa, Zea mays
  Coding DNA Sequence Number=SeqID_41460
MERGHLASSYSSGSGRLDTGIVPKALPCSLDYKLVTHLRNEDSREKPRSETLAIHLGSEYGSS

SEQ ID NO: 83240 - protein, 59 aa, Zea mays
  Coding DNA Sequence Number=SeqID_41461
MERGHLASSYSFGSGRLDTGIVPKALPCSLDYKLVTHLRNEDSREKPRSETLAIHLGSE

SEQ ID NO: 83241 - protein, 151 aa, Zea mays
  Coding DNA Sequence Number=SeqID_41462
  Homolog annotation: Hit_ID=Q8LBS7; Match level="QueryCoverage=49%, HitCoverage=76%, E-value=2e-09, Identity=46%"; Hit description =Putative nitrilase-associated protein
  Subcellular localization annotation: CTP_CleavageSite=103; ConfidenceScore=5.21e-01
MSRGCSASGGQSSLGYLFGSGEPPKPVVAPAASAPPVEKPSAAKTDATKQVAAGVTSQTNNYHRADGQNTGNFLTLSTTSLRPSEDLETKKTSIAVIIVVSVLASVLVVTSLFEGFKYWQKKKRERDQARFLKLFEEGDDLEDELGLSNEF

SEQ ID NO: 83242 - protein, 75 aa, Zea mays
  Coding DNA Sequence Number=SeqID_41463
MGTFNRPSEDLETKKTSIAVIIVVSVLASVLVVTALFGGFRYWQKKKRERDQARFLKLFEEGDDLEDELGLSNEF

SEQ ID NO: 83243 - protein, 170 aa, Zea mays
  Coding DNA Sequence Number=SeqID_41464
MSTGELGFTAIGLKTKDGVVITTAEWCKDIALKRFWESIILISKKYKDVYCVKRIGRSHDIYTWRHSIRLDAPIDLKGLNTGHFALHIIEWWDSGLKAQLSMMDNFLGIYHGSIVEQDRYGNAEFVDMQRVAEIVATAKEKIGWHDVDDIDVDGVLNVGPPPNVQRLTFL

SEQ ID NO: 83244 - protein, 94 aa, Zea mays
  Coding DNA Sequence Number=SeqID_41465
  Homolog annotation: Hit_ID=Q94EV6; Match level="QueryCoverage=35%, HitCoverage=6%, E-value=5e-09, Identity=93%"; Hit description =Cytochrome P450
MAAAFTRYLSSPFPLPHPPDLGAGRRVEARANADGLVEAASALPPTRPPPCPHQICETVLYETLRLYGAVPLIARRATAGADLYDVKVPKGDEE

SEQ ID NO: 83245 - protein, 261 aa, Zea mays
  Coding DNA Sequence Number=SeqID_41466
  Homolog annotation: Hit_ID=Q94EV6; Match level="QueryCoverage=39%, HitCoverage=21%, E-value=3e-39, Identity=81%"; Hit description =Cytochrome P450
MAAAFTRYLSSPFPLPHPPDLGAGRRVEARANADGLVEAASALPPTVTVPTAAPSTMPAPDLGAGRRVEARAHAGGLAQAASALPPTVKGPMAAPSAMPAPNLRDRVVRDAPAVRRGAVDREAGDGGRGPLRREGSQGRRGGVGHGRGAFNLLQFRDGMARAATHPNALLSFSLGPRSCIGQDFTMLEAKATLALILRRFAFRVAPDFVIIIFRKGSPSRCASSAPRSSCSLASSSRKDAIRDKSVFMFNALLEEENKAWI

SEQ ID NO: 83246 - protein, 124 aa, Zea mays
  Coding DNA Sequence Number=SeqID_41467
MKGTGRRVPMGKRSGHGRAEGGSRDATGELGHWREPRCLDFHTKRNRGSGTRGAESLRSRPVLFCSRGGDGAAKVAPPAAEQRREGAGHQAAMGAWPNSREADKWDLRVSVTALVGCGGKKWTA

SEQ ID NO: 83247 - protein, 319 aa, Zea mays
  Coding DNA Sequence Number=SeqID_41468
  Homolog annotation: Hit_ID=Q10H93; Match level="QueryCoverage=40%, HitCoverage=15%, E-value=6e-16, Identity=42%"; Hit description =Expressed protein
MEEEDIVSKLLDFIAEPHSAAESWGSYDQGSNSKKRKRGGESASKTPDGTPSRSRKKFVDDDTSSKRQNKALQYDIDEDESMKSDSEENIDEDSDEAANKQEGYGSRKEKAGKKLSEVKESSGNPNIANKHFWIGLQSKALFLLIYLQNWAQQGSWCELITHQLEKDQQASNERTNGNDNLHNILDPPRKMKRKEELTMEEGLNSKNAREEVKVQKFVDDDTSSKRQNKALQYDIDEDESMKSDSEENIDEDSDEAANKQEGYGCGKEKAGMKLSEVKESSGKKKSNTGSGHKSGPPNKIIKNLEKSINQDSRGKRKPQ

SEQ ID NO: 83248 - protein, 84 aa, Zea mays
  Coding DNA Sequence Number=SeqID_41469
KFVDDDTSSKRQNKALQYDIDEDESMKSDSEENIDEDSDEAANKQEGYGCGKEKAGMKLSEVVPSLSSALTSSGEENDGKTKPT

SEQ ID NO: 83249 - protein, 113 aa, Zea mays
  Coding DNA Sequence Number=SeqID_41470
MKSDSEENIEEDSDEEDTVSKLLDFIAEPHSAAESWGSDDQNKALQYDIDEDESMKSDSEENIDEDSDEAANKQEGYGSGKEKAGKKLSEVVPSLSSALTSSGVENGGKTKPT

SEQ ID NO: 83250 - protein, 154 aa, Zea mays
  Coding DNA Sequence Number=SeqID_41471
MGEHRTLGYTVQTPKVGLALEKLFEDGVVKREDMFVTSKLWPDGAKNTMPYEKEGGAHLGRGRDLSVLGADELGGGERRQDEAHLRERITNLEKAGLDPHMEAQIYIATDRMLALRSATADVCGRLNRWGRKRARETGRELWRLGQRPDESAGK

SEQ ID NO: 83251 - protein, 88 aa, Zea mays
  Coding DNA Sequence Number=SeqID_41472
MFPRFCGSARHFGRDIIMPNLKSSVTTTASAVEHRDEVLKALPPAVSRHVVCRSAVGSLEEATKAKEAGVDGIIVQGREAGGHVIGQE

SEQ ID NO: 83252 - protein, 187 aa, Zea mays
  Coding DNA Sequence Number=SeqID_41473
MFPRFCGSARHFGRDIIMPNLKSSVTTTASAVEHRDEVLKALPPAVSRHVVCRSAVGSLEEATKAKEAGVDGIIVQGREAGGHVIGQAKAKPCYPVLIYCGVVLAQIHARWDPCGHYGWPKSTPHKRTLPYLALFLYHPTTIPFHMRRGRSGKPTIYSPFHKSRASYLLIQRVNIGKAATPVSSSSR

SEQ ID NO: 83253 - protein, 478 aa, Zea mays
  Coding DNA Sequence Number=SeqID_41474
  Homolog annotation: Hit_ID=Q6QP54; Match level="QueryCoverage=32%, HitCoverage=42%, E-value=3e-22, Identity=43%"; Hit description =Putative kinase
  Subcellular localization annotation: CTP_CleavageSite=44; ConfidenceScore=5.09e-01
MQLHQGAHPFDFDASSMGPRPTRHVTGAPVTTCEKLHRHLRQYRAFSTAEPVPRLEATLRMAQQCQPSTSVTGRSAAGEDTTVDMAKSGPTVMAAAGGRKQQSSCLQAHVPSWDSERALSHGVKTTCPCFVPRTARARTTAGPPTTRPIALTLRQNRRHLWQAKQATLHLRHNDRVKKGTGKGDTLKGILLREGNGPRALLLIRGSKAGPSKGFDSRLRPLGLRAHYWSEENSAACAAPTAVPPVRVRLTAAKTGLRRHRKLRLAQPQGSDPTSTSDDGLRLARPQGSDSASTPEDGLRLARPQGLDSASTPEDGLRLARPQGSDSASTPEDDLRLARPPGLGLNLDPRRRSSPRPTPGLGLNLDLGQRSPPRPTPGPGLSLDLGGASASPDLGLEPTTSQGGAIIILPLASSGYGEQDRRPIWLAPVKHVMMAPRVLHDDDGSQPLTEARRRQQGSDSPDSCTSTGLKRSSYGHDIT

SEQ ID NO: 83254 - protein, 211 aa, Zea mays
  Coding DNA Sequence Number=SeqID_41475
MAEVKRRPLRLPKGCLESRHRFCSREGAVTSEVSVSRRRRSPSTRSALPLKASLAQLSNPRLFCDESEPEAAVSVWTEAGSAREEASLAQEYVASLAEEVQQRRLEPGQVVRWQDQPWSQAVEAMSRADVLGGQLAEATERPVEVFARAGTLMETLAMMARAWCWLPPSRWRSFRPCHRPRPGQIPPKVETTPRVLLFPLLMYEPAGTVCQ

SEQ ID NO: 83255 - protein, 112 aa, Zea mays
  Coding DNA Sequence Number=SeqID_41476
MARRWPGAAVADLRGCTGNGGGAPTAAGKRARDGGDLWRRCSGVRAARERWKRGLLERKWGRGRGRVGLGAQVARGGAVASSTRDVGAEKAAARSSGGSYARTTGLTGRARE

SEQ ID NO: 83256 - protein, 90 aa, Zea mays
  Coding DNA Sequence Number=SeqID_41477
MARRWPGAAAADLRGCTGNDGVPGPTSECRRVPQPRWVDVRPSAKGGSEEAGDQRERGGNPVAFGSSRAQVGRKERIQVYNGRCSRVLRV

SEQ ID NO: 83257 - protein, 311 aa, Zea mays
  Coding DNA Sequence Number=SeqID_41478
  Gene Ontology: Mol. function=hydrogen-translocating pyrophosphatase activity; Cellular component=integral to membrane; Biological process=proton transport
  Homolog annotation: Hit_ID=Q06572; Match level="QueryCoverage=89%, HitCoverage=37%, E-value=1e-138, Identity=91%"; Hit description =Pyrophosphate-energized vacuolar membrane proton pump (EC 3.6.1.1) ...
  Homolog annotation: Hit description=(Pyrophosphate-energized inorganic pyrophosphatase) (H(+)-PPase)
  Pfam annotation: Domain name=H_PPase; Domain location=1-266; Score= -12.6; E_value=1.5e-23; Accession=PF03030.7; Description=Inorganic H+ pyrophosphatase
MYGIAVAALGMLSTIATGLAIDAYGPISDNAGAEMAGMSHRIRERTDALDAAGNTTAAIGKLLLCPWRFLVPLSSRAGVKVVDVLSPKVFIGLIVGAMLPYWFSAMTMKSVGSAALKMVEEVRRQFNTIPGLMEGTAKPDYATCVKISTDASIKEMIPPGALVMLTPLIVGTLFGVETLSGVLAGALVSGVQIAISASNTGGAWDNAKKYIEAGASEHARTLGPKGSDCHKAAVIGDTIGDPLKDTSGPSLNILIKLMAVESLVFAPFFATQGGLLFKIAAAVRIQSLGLPEPPEARFTVSLTTLTPCSST

SEQ ID NO: 83258 - protein, 226 aa, Zea mays
  Coding DNA Sequence Number=SeqID_41479
  Gene Ontology: Mol. function=hydrogen-translocating pyrophosphatase activity; Cellular component=integral to membrane; Biological process=proton transport
  Homolog annotation: Hit_ID=Q06572; Match level="QueryCoverage=85%, HitCoverage=25%, E-value=1e-102, Identity=96%"; Hit description =Pyrophosphate-energized vacuolar membrane proton pump (EC 3.6.1.1) ...
  Homolog annotation: Hit description=(Pyrophosphate-energized inorganic pyrophosphatase) (H(+)-PPase)
  Pfam annotation: Domain name=H_PPase; Domain location=1-212; Score= -219.9; E_value=9.9e-16; Accession=PF03030.7; Description=Inorganic H+ pyrophosphatase
MTKAMYLEESPNILQFGMERIVDNLQKKNNCTPLVFIGLIVGAMLPYWFSAMTMKSVGSAALKMVEEVRRQFNTIPGLMEGTAKPDYATCVKISTDASIKEMIPPGALVMLTPLIVGTLFGVETLSGVLAGALVSGVQIAISASNTGGAWDNAKKYIEAGASEHARTLGPKGSDCHKAAVIGDTIGDPLKDTSGPSLNILIKLMAVESLVFAPFFATQGGLLFKYL

SEQ ID NO: 83259 - protein, 550 aa, Zea mays
  Coding DNA Sequence Number=SeqID_41480
  Homolog annotation: Hit_ID=Q69UJ1; Match level="QueryCoverage=20%, HitCoverage=38%, E-value=1e-54, Identity=91%"; Hit description =Putative RNA-binding protein RBP37
  Pfam annotation: Domain name=PWWP; Domain location=72-129; Score =13.5; E_value=0.00051; Accession=PF00855.8; Description=PWWP domain
  Pfam annotation: Domain name=RRM_1; Domain location=232-294; Score =31.9; E_value=2.2e-06; Accession=PF00076.12; Description=RNA recognition motif. (a.k.a. RRM, RBD, or
  Pfam module annotation: Pfam domain module=PWWP::RRM_1; Domain location=72-129::232-294
MAALSAPLRAIAAGSRVAASDTARWISPTMHASTAPPMEGILHSALTKMKGFQALAKRKRTAGAAVVEVVAKWKVGDLVLTKMKGFQAWPAMVKYLRFLVVVDNYLLSSAALVPLYFYSFLNTDYKTREYEILRLTSMGVIGVFVKVVKNEGWERLYGRLMPSLVGTAASQNRAEARALERSRRGLSDGSVGVFQSLTVAALSGCVNALLTNPIWVVVTGMQVDLAVHLAYGHQVTEENLAALFINYGQVVDCHMCGDPNSVLQFAFIEFTDEEGARVALNLSGTVLRYYPVRVLPSKTAIAPVNPTFVPRSDDEREMCARTIYCTNIDKKVTQADLKLFFESICGEKMTIQPAQYHWLTAMTATVASMTMNENEPVAGWLAGWLAWHAGEFAAFLTGANLIMEHVFSNAAVVRSFTAYLGKAVGVDAPSKWRIPVPGLPQGFNQVDLVGIIMYLPTSDARQRKEITEEFFSYRSLARSLWDDYSTYEHWAKIEVPKDKAELAELQARLRKRFPVDAYNKARMELDPNKVLSNAKLEKMFPVLEPAHQTK

SEQ ID NO: 83260 - protein, 86 aa, Zea mays
  Coding DNA Sequence Number=SeqID_41481
  Subcellular localization annotation: CTP_CleavageSite=9; ConfidenceScore=5.13e-01
MAALSAPLRAIAAGSRVAASDTTRWISPTMHASTTPPMEGILHSALTKMKGFQALAKRKRTAGAAVVAVVAKWKVGDLVLTKMKGF

SEQ ID NO: 83261 - protein, 424 aa, Zea mays
  Coding DNA Sequence Number=SeqID_41482
MAGSAARALLGRSDARVPRALLRALAPSPCAPRARGYERPRELQRLVILDQRLVILDQRYFGTGGNEIDGSGYDYGAGKWYSFRLERMARLRHTARKSVIPFLPSRLAERPLRRPVAGQSSHLERLHHRLREEQERRRQEQQSSSLSLHQEIESVRSCSPVLPLEPPPAPPLGAPASGVAAGGDPDDGGGDDSSSHDTDFSANPEPEGWVARPITRDAARGCHFHDALDTLLRRAFDRHTWSVEYRCLVYQHSRGVYPDRWEATCLVRCPENSLQGAEACSEHYSISERDSAEAAMQDAARRALSHYCSVFGGAADGLDLKYYPRRSSGSTGGVIVSPVGEGNPRLSSTVNLAAVLNTELDHALDELSRARAEIALLRAERAERRYLDGGSPAPVGTQHPYRSPQRGHQSYGNPACKTKITLEP

SEQ ID NO: 83262 - protein, 77 aa, Zea mays
  Coding DNA Sequence Number=SeqID_41483
IVIRFRASRNRRSSFDDQVNKLLEFYEIEYPEHLFGEGNRARGYERPRELQRLVILDQRYFGTGGNEIDGSGYDYGA

SEQ ID NO: 83263 - protein, 108 aa, Zea mays
  Coding DNA Sequence Number=SeqID_41484
MAGGKELAGAKEGCLAGEGFELGIKVNTLGLWLKHLRETLGDTGVSQPSSLKGISSRDSSKSPPGVKRRIRKAGGGVGHDYVPISLGRQSGKLDRKNSSVSQVASSSE

SEQ ID NO: 83264 - protein, 49 aa, Zea mays
  Coding DNA Sequence Number=SeqID_41485
MAGGKELAGAKEGHLAGEGFCLLVSKIWSPEIWYVFLPEPEANPGFCRV

SEQ ID NO: 83265 - protein, 37 aa, Zea mays
  Coding DNA Sequence Number=SeqID_41486
MAGGKELAGAKEGRLAGEGFELGIKVNTLGLWLKPKP

SEQ ID NO: 83266 - protein, 147 aa, Zea mays
  Coding DNA Sequence Number=SeqID_41487
MTHFLSSFFDLLLKVGQPSHLLLFPLHLLAGELVGGEESSLSRAQLTNQTGQRASPGIKEGGRPKSGVDDLGFPVKFCRVRGLGKLHKLMAKLTERLARLGSNWGGLATVAEALVAMAGGKELVGVKEGRLAGEGFELGIKVNTPSL

SEQ ID NO: 83267 - protein, 116 aa, Zea mays
  Coding DNA Sequence Number=SeqID_41488
MATTTAVERLGAPNRYIPFVDAFTLKKYVAKGVDVMVVRELNGGVDDERARQGRADGERDAQGAHDRTSQIAHVAYCASENLNHCKIKIGLPDPTDNKCKSVSIENKISLKVHMSI

SEQ ID NO: 83268 - protein, 421 aa, Zea mays
  Coding DNA Sequence Number=SeqID_41489
  Gene Ontology: Mol. function=actin binding; Cellular component =cytoskeleton; Biological process=cytoskeleton organization and biogenesis
  Homolog annotation: Hit_ID=Q9SQH4; Match level="QueryCoverage=60%, HitCoverage=10%, E-value=1e-18, Identity=47%"; Hit description=Actin bundling protein ABP135
  Pfam annotation: Domain name=Gelsolin; Domain location=219-293; Score= 21.1; E_value=0.0039; Accession=PF00626.12; Description=Gelsolin repeat
MDLVTDAHRVAWLQHGLLVLLQIHPVRLHLDGDAAVHRPTTEDICYYLGCHLTSSKATRNLVRAPEASSACMLFFRDRAAGAGEGSNATDLPWTPPMWSSAKSRPRAGKEGHAAARALGEVWCRGSGQQREARRNLRRVSSPTTALHLPHPFLLIFPPFSIPSPGFTALHGEEGVHRDGYDDDDGAAWRSQQFVDAFTLKKEVAKGVDVMVVRELNGGRLEVTEIFNFSQDDLLTEDMMILDTHGEVFIWIGQYVESKEKQKAFDIGQAYHRWDASAGREDVETLAQCQRMIACGEWPPLAVAYDHVEGSTMEAGGILGASLILWVLVPHMMAVTESSRFHESLKKDDVHIRRLIINQVLPLSASFCRFCAAKWRVTEIFNFSQDDLLTEDMMILDTHGEVFIWIGQYVESKEKQKAFDIG

SEQ ID NO: 83269 - protein, 163 aa, Zea mays
  Coding DNA Sequence Number=SeqID_41490
MARVACTLHAKRLDGGVSMLLVGVNLIWVWVEDGQRMNELRADVRHLQDELAERDLAIDWAVNSRSIAWDQEAKARSRVAELSAAIDNLQVYCNTLLEEVHVLYSRLHPDVPADPIGMGAGPSGTTREGLGGELDLFKPPPSMNLVDERSPTTDSEATKDDKY

SEQ ID NO: 83270 - protein, 112 aa, Zea mays
  Coding DNA Sequence Number=SeqID_41491
MAPMYPAPPEQVAAIEYSRLRPEHEEEFVVEEKVVSQTENPPVENNFYFDICGPFNWPHASSWVSFASVGPIPKRLPSNGSGDMARVACTLHAKRLDGGVFVLSAGMNPFWS

SEQ ID NO: 83271 - protein, 146 aa, Zea mays
  Coding DNA Sequence Number=SeqID_41492
  Subcellular localization annotation: CTP_CleavageSite=35; ConfidenceScore=5.10e-01
MGKPVPSLLMLLLSRGRVPTQQSNPVYNGSSSLISCEKQTIRIEFLSLQVTALVPTITGMGDLVSGHVRGKVYCQVQSGTRLTDLPYFSVMHKTGACLPKQWQAGPLVQALVLDRGQPPGQLLAPARGCTLRPQDYSLSKCNEHGF

SEQ ID NO: 83272 - protein, 374 aa, Zea mays
  Coding DNA Sequence Number=SeqID_41493
  Subcellular localization annotation: CTP_CleavageSite=25; ConfidenceScore=5.11e-01
MGKPVPSLLMLLLSRGRVPLNSPTRCTMDQAVSLAARSRRFESSFYPCKIRAHRLGVQCPTDPDWTSCSDRTCTHHNRNGRPRLRSREGICLRAGSLRLCIKPGLAFQSSGWQVLWCRLGCWIWGYLLSSSLLRHEDVLSVSKIAVYRNAMNISYAFSKLLSNLKTDLIKVFWKNSLHRVLPLTETVTARKKRAARLTGGEGGPAKGGVGSGRLWRSRRGTARHRRWPESPGPRGQAGVLVGGEYTGQTTANWFNPRARLASRGHAATVCARNRRVVEWFTRSTYSGGVERSGERGLASLAKETPIPCSGSLTEVCTSFSEGRTGLGMALLAGLWWQRGWAAADSLRTGKQRRANSGEVWRVRGRVQSKPGKAL

SEQ ID NO: 83273 - protein, 181 aa, Zea mays
  Coding DNA Sequence Number=SeqID_41494
  Pfam annotation: Domain name=PPR; Domain location=139-173; Score =31.6; E_value=2.8e-06; Accession=PF01535.11; Description=PPR repeat
  Subcellular localization annotation: CTP_CleavageSite=91; ConfidenceScore=5.41e-01
NLHRPSICVKSSPSISLPPLQASSIHRSQLLLSPLPTTHTGAGVETDHHGTTSSSGCLRPRHPSVLDFPPSSRSPASRTGSSTWRDSSSLSSMAAAEVYSPIAAAAAQQQREKATSQIWRAVVGWWGGSTKRRSRRDVRAYNTVLHALSRAGQYERALELFAELRRQGYEIKRDSMFRKAR

SEQ ID NO: 83274 - protein, 182 aa, Zea mays
  Coding DNA Sequence Number=SeqID_41495
  Pfam annotation: Domain name=PPR; Domain location=140-174; Score =31.6; E_value=2.8e-06; Accession=PF01535.11; Description=PPR repeat
MGPQVIDREGKKESILPIKAVRASSIHRSQLLLSPLPTTHTGAGVETDHHGTTSSSGCLRPRHPSVLDFPPSSRSPASRTGSSTWRDSSSLSSMAAAEVYSPIAAAAAQQQREKATSQIWRAVVGWWGGSTKRRSRRDVRAYNTVLHALSRAGQYERALELFAELRRQGYEIKRDSMFRKAR

SEQ ID NO: 83275 - protein, 59 aa, Zea mays
  Coding DNA Sequence Number=SeqID_41496
MAVVFCELVAQGEALQNFQHGAGFWSAMTSNVTFQSRNVLSKKFMVYPYMPSIFEMKPN

SEQ ID NO: 83276 - protein, 57 aa, Zea mays
  Coding DNA Sequence Number=SeqID_41497
VAAAVEPKLRCLLKADMVVVFCELVAQGEALQIEHREAGLPEFVSQDRVMDVGHHSG

SEQ ID NO: 83277 - protein, 421 aa, Zea mays
  Coding DNA Sequence Number=SeqID_41498
  Homolog annotation: Hit_ID=Q9AY51; Match level="QueryCoverage=48%, HitCoverage=100%, E-value=1e-101, Identity=85%"; Hit description =Putative peptide methionine sulfoxide reductase
  Pfam annotation: Domain name=PMSR; Domain location=255-408; Score =277.5; E_value=2.6e-80; Accession=PF01625.11; Description=Peptide methionine sulfoxide reductase
MDPLHWMIEKAAEDGLLGQVLPRGAKLRCSLYADDAGMFVRADKSDLEVLKGILNAFEGCSGLKINYDKTKIFPIRYPASLWPTLIDVFPGKYTSLPGKYLGLPLHYRNIHKNAEGAGVEWTWKHPTTNQPTNQASSRRVEASGPRRHKRKREDKASAAPPPMPPLLTSPASLPSASPLLVSCIGALHRPGPFLHQRAAASVHFLAPHRKTRPPPAMSWLGKLGLSGLGGSPRASEASAALAQGPDEDQPAPGNEFAQFGAGCFWGVELAFQRVPGVTRTEVGYSQGNIHDPTYEDVCTGTTNHNEVVRVQYDPAACKYDDLLDTFWARHDPTTPNRQGNDVGTQYRSGIYYYNPEQEKAARESLEKQQKLLNRKIVTEIVPAKRFYRAEEYHQQYLEKGGRFGFGQSAAKGCNDPIRCYG

SEQ ID NO: 83278 - protein, 546 aa, Zea mays
  Coding DNA Sequence Number=SeqID_41499
  Gene Ontology: Mol. function=helicase activity; Cellular component =nucleus; Biological process=RNA-dependent DNA replication
  Homolog annotation: Hit_ID=Q5JMT3; Match level="QueryCoverage=59%, HitCoverage=54%, E-value=2e-72, Identity=40%"; Hit description=DNA binding protein-like
MSTYSNKSCHLTSVFFGKHTALISIRLWEFLDPQDDSRLLHTDLVLLDEEGNSIHAQIYPPLCQQFSALLDEGGVYNLKYFLVRKANRFYKPVENCSMISFTKWTTVEVVLQIPPAFPVCTYNLTPIEQLQPRMDYKEYFTDVLGVVSVISHVSSLRTRGRQAEVMKRTVTISNARDAGPTVDVVLWGERATSFPAEQVHRDSDSSPQIIIFVGTLVRSYADNVSLSGGSSCKWFINAPVPEVNALRASTEANHRPVIWDQGKVGAERTIVAVPEHKKLKDIKYLHPFENKKKEWLVIVKVLKIDSSWWYNACKKCLRTTKPHGDTYRCTNNSCDNIGSPTPRYKIRLTAEDDTDTAEFIFFGRMAQRLIKKMWTPSYQLIHLKWMVAAHFQLHRPHSHHPPYYLKHFWRPANFAAGQGSGVTQNKGAAFICESSLTPESRKVSYSAKGDNLLLGTEVIPAPPNVQAHSGAHNTPGANTLRPLSLKLANSQANAYTVLDESTNKTHKSVTGKRSRTSPSKKAARKLFRDEDITDDDAAGSTDADAE

SEQ ID NO: 83279 - protein, 1090 aa, Zea mays
  Coding DNA Sequence Number=SeqID_41500
  Gene Ontology: Mol. function=helicase activity; Biological process =viral genome replication
  Homolog annotation: Hit_ID=Q6YTQ6; Match level="QueryCoverage=79%, HitCoverage=64%, E-value=1e-166, Identity=59%"; Hit description =Helicase-like protein
  Pfam annotation: Domain name=DUF889; Domain location=881-1056; Score =11.3; E_value=2.9e-12; Accession=PF05970.5; Description=Eukaryotic protein of unknown function (DUF889)
  Subcellular localization annotation: CTP_CleavageSite=50; ConfidenceScore=5.05e-01
HDPTLFSTRRGSRSDGGALKDARAARRAVAVGGPGGLRLDLRWYGSGGASASVAARRRDRRVRACRRFAVYPGDFISSVLVCIARHPTYTVVVRCPCPYRHERVKSVSAVAQRRLVYNLCCRGDPEVARLLLNMLDEHNKLVAAFRFAKERLDEEGNQKVTLRLLGCNTRHDAQYNLPANGELAAVIVGDCSSSQYKYDVLVQAREGGLKHVSCLHPSYMALQYPLLFPYGDRGYHLGIKYSDVGGGDASCRKYVTMLEFVRHRSHYRLNEPNPLAVDAYYGRLSNQLAVDAYSTIEASRLQFIADHQKELRCESVQGITDAIGRGLTSADSVGGRVIVPASFTGGRRYHVMNYQDAMAICRVYGPPDLFVTFTCNPKWKEIVDALRFEPGQQPCDRSDIVVRVFHMKVDEFIADIRENKVFGPIRAGPQIAPPNEIREYIDARYLSTCEALWRIFEFDIHFRVPSVERLAVHLPAKNIVRYEPGADLQTLLLSRAAKKTMLTEWFETNSKYSDARHLPYCDFPKEWSWDSSVRCWRRRRSSSTKIGRMYYVHPTAGELYYLRVLLMFVSGATSFVDIRTFQNTVYETFREACEARGLLEGDNEWNLLFDEAIVSASASQLHQLFVTIVVHCPVCNIRALFDKYWIYFTDDIHRGLKEALGNPHYTAPHEQLLMLLSRKLADTFANSGANIADYELPILPARGDEVFGNRLIDDELSPGPLLLCDHAATAAVSQLNADQRFIFEMLIESALSCSPGLFFVCGHGGTGKTFLWNAILTHLRSRQKIVLVVASSGVASLLLPKGRTAHSRFKIPFDLDESSVCGVKRGTMLSELIQRTSLVIWDEAPMTHRHCFEALDRTMRDILSEHKAENANIPFGGKPIVLGGDFRQILPVVRKGSRAAIVNASITSSPLWQHATVLKLRRNMRLSNPSLHGKEPANMEQFSKWVLDIGDGALPAVTRGDESEPTWVTIPEDLLIHTDGDAVASLISEMGDILIPSLMVGDCSHSLCVRVSRLWEFLHPQDDSRLLHTDLVLLDEEGNSIHAQIYPLLCQQFSALLDEGGIPPAFPVCTYNLTPIEQLQPRVDYKEYFT

SEQ ID NO: 83280 - protein, 304 aa, Zea mays
  Coding DNA Sequence Number=SeqID_41501
  Gene Ontology: Mol. function=nucleic acid binding
  Homolog annotation: Hit_ID=Q75LY7; Match level="QueryCoverage=81%, HitCoverage=58%, E-value=1e-114, Identity=84%"; Hit description =Expressed protein
  Pfam annotation: Domain name=CBS; Domain location=92-207; Score=30.6; E_value=5.5e-06; Accession=PF00571.18; Description=CBS domain
MAEVDFTSCRRRSWNLGRSSVGSRPCPLEYWLSGLHSRRPGPEQYQDIKWCLIGGIKLHGLVAGKGGELTHDETTIIAGALELTEKKAKDAMTPLCQTFAIDINAKLDRNLMQEVLEKGHSRVPVYYEKKTNIIGLILVKNLLSVSADDEVPIKSVTIRKIPRVLEEMPLYDILNEFQKGHSHMAVVIRKNNPSYQPAEQAANDGGTFEVSIAIDDKNNEKVVKNLPPPLQRWKSYPNTQNTSNRGNRPKKWSKDQADVLQVHKEPLPTLSEDEEAVGIITMEDVIEELLQEEIYDETDVHEEQ

SEQ ID NO: 83281 - protein, 347 aa, Zea mays
  Coding DNA Sequence Number=SeqID_41502
  Homolog annotation: Hit_ID=Q75LY7; Match level="QueryCoverage=77%, HitCoverage=58%, E-value=3e-97, Identity=75%"; Hit description =Expressed protein
  Pfam annotation: Domain name=CBS; Domain location=92-204; Score=18.8; E_value=0.0014; Accession=PF00571.18; Description=CBS domain
MAEVDFTSCRRRSWNLGRSSVGSRPCPLEYWLSGLHSRRPGPEQYQDIKWCLIGGIKLHGLVAGKGGELTHDETTIIAGALELTEKKAKDAMTPLCQTFAIDINAKLDRNLMQEVLEKGHSRVPVYYEKKTNIIGLILVKNLLSVSADDEVPIKSVTIRKIPRVLEEMPLYDILNEFQKGHSPHGCSHKEKQFKVTNQLNKLLMMVEPFEVSIAIDDKNNEKVVKNLPPPLQRWKSYPNTQNTSNRGNRPKKWSKDQADVLQVHKEPLPTLSEDEEAVGIITMEDVIEELLQKIMVTNFYLLGTMKILRNSVKRRYTTRQTYMRNNDAGLAPSLQLLESALLCKTYV

SEQ ID NO: 83282 - protein, 71 aa, Zea mays
  Coding DNA Sequence Number=SeqID_41503
MLKDPKKRLWPVVHHHCLLFVGFTEGWKHLVTANDLRTGDVCEIVKGPDDGKEEGVKADLREFQDFDEFED

SEQ ID NO: 83283 - protein, 80 aa, Zea mays
  Coding DNA Sequence Number=SeqID_41504
MLKDPKKRLWPVVHHHCLLFVGFTEGWKHLVTANDLRTGDVCEIVKGPDDGCLWCNLCSGKEEGVKADLREFQDFDEFED

SEQ ID NO: 83284 - protein, 197 aa, Zea mays
  Coding DNA Sequence Number=SeqID_41505
QRWPESVGPRAQAGMLVGGEESGLLTARWINWTGQRGSRNAREDMGARNWMETHWLALSTRGGERPKSGEVDLGLPVKSGMVRGLGKLHGPLAELAEALARLGGGWSGLATVAEALAAMAGGIELAGAKERGLAGEDSSPPTSISACARGPADSDHPRRRPTHRCDPRDLPYVLDHLTGAISLPVSPSALSSATVTV

SEQ ID NO: 83285 - protein, 205 aa, Zea mays
  Coding DNA Sequence Number=SeqID_41506
METNLLYSKIKLASSHISPKGQRWPESVGPRAQAGMLVGGEESGLLTARWINWTGQRGSRNAREDMGARNWMETHWLALSTRGGERPKSGEVDLGLPVKSGMVRGLGKLHGPLAELAEALARLGGGWSGLATVAEALAAMAGGIELAGAKERGLAGEDSSPPTSISACARGPADSDHPRRRPTHRCDPRDLPYVLDHLTGAISLP

SEQ ID NO: 83286 - protein, 410 aa, Zea mays
  Coding DNA Sequence Number=SeqID_41507
GPDSLGAGSGERDPVPWGGPEPVWPLSLVPYPKACTLHHSVTGPGPSRGYLLGATAKLFLRYAGMDYSVPAGSRWKLAPGSLTSGGDHLYSERPPLHQRLASNSGHLRPGGLPAMAAITVHTKRSSLPSSYRGEDKTIQERGRHLHDVRRLVRPSGRRRNDAADGAGDTTDVADLCMVRPSPVRWTDSHAPISGRRQRWRRHQSHRSQRDGAAARLASHPKILGGVRDGAVAQPAAHLHEAGNHPSPQMQEEEAERASPPWTSRGEKSHCRSRQYHASSRSSQKAEKINFQNQCSDLRHPAHGPTKALSAEVTGQSAAGTGVVVGVTMGGPAVIASTNAQEQRANRQSNFGPTCRLASSPKVGPGATVVTLNQRYPLLQYEDAVPLDLHEGAPNPCAHNPDPRLWLGTPE

SEQ ID NO: 83287 - protein, 73 aa, Zea mays
  Coding DNA Sequence Number=SeqID_41508
MKVVGVLPEWLAQSLPEELEGVQTEQEEAEHRYAEEYLVLALGPQGLDDRSQIGGMRPRGCLGTEMAESAAQR

SEQ ID NO: 83288 - protein, 583 aa, Zea mays
  Coding DNA Sequence Number=SeqID_41509
  Gene Ontology: Mol. function=acyl-[acyl-carrier-protein] desaturase activity; Cellular component=chloroplast; Biological process=fatty acid biosynthetic process
  Homolog annotation: Hit_ID=Q40731; Match level="QueryCoverage=59%, HitCoverage=88%, E-value=1e-157, Identity=76%"; Hit description=Acyl- [acyl-carrier-protein] desaturase, chloroplast precursor
  Pfam annotation: Domain name=FA_desaturase_2; Domain location=59-389; Score=757.9; E_value=6.2e-225; Accession=PF03405.5; Description=Fatty acid desaturase
  Subcellular localization annotation: CTP_CleavageSite=37; ConfidenceScore=5.61e-01
MAVAAFPSCGAFAPPCLVSTRRAFSSVVAMASAAPVRAPSRKPFAPPREVHRPVAHSLPPQKREIFESLESWAADNILVLLKPVERSWQPQDYLPDAASESFDDEVRELRERAREIPDDYFVCFVGDMVTEEALPTYQTMLNTLDGGVRDETGASSTSWAVWTRAWAAEENRHGDLMNKYLFLTGRVDMRQIEKTVQYLIASGMDPKTETNPYMGFVYTSFQERATFISHGNTARHARRYGDTKLAQICGTIAADEKRHESAYERIVEKLFEVDPDYTVRAFADTMRKKVAMPAHLMYDGQDDGLFARFSAVAQRIGVYTARDYVDILEFLVRRWGVQELTGLSGEGRRAQEFVCELGPRFRRLEERAHDNKAKDPEFAPFSWIHGRQLAEARASGSPGEMEAPGGIRWVATLSSRFHSSLGALISHSKFDVVDFLICEIEDTVLDGLRARRQLPYAHYLCYIFAQLIRPPQFQGTLEASRLQFGSYRPAPEDPVPVPDPVPDTQAEDAAFHQFETQGTVVPDDDDDFGIPPPPHVPPRSHDHEAESSSVAPPAVDPALAAILQSLSQQQTLIASEQARQAAE

SEQ ID NO: 83289 - protein, 878 aa, Zea mays
  Coding DNA Sequence Number=SeqID_41510
  Pfam annotation: Domain name=DUF1110; Domain location=560-747; Score=- 57.2; E_value=0.056; Accession=PF06533.3; Description=Protein of unknown function (DUF1110)
MEVVELVPCARNKLGNWWDYWFYVSEAKVEDHPGLPATIMCSHYYVAYPPFEVAEDDENEWALRIAARTSSGRDLVEEFIGYGVWPLAHGWALGEVCPREMPSLGGRKVRSPLFALDVRGRDPVAVVREAEDGATEALRSWDIRGSNDRLNRVFELNRLPYGGYPREDVVDRRGRKPAIVTEEDPAQEAAPATKKRKLGTTVGELGVPDSFAMELIGTCAAPGGRMSSPELRESSARMLEVTGGRWPKNVLIPRAAGEDFFTSHMARDLRVFPYGRNIAAVVSAVMNNDRQDAAQKRRAVVRMVDPVHEAKRAWGSAKAAASGSGWLVPAAKTAAPEGSKASTGEKAVAVGGTKPPSGGPLPAKLPPPGKRVADIGMNISVDDYLVGSGEGQLVVVPPSVAATSPSVVVKAKGAMQDPWAAFCASGEILTAAAARDVAGTMSQRLREVSQQLSQQLRQQLKQAADFADRVVSGVLTAEVAAEVENLRAQHADAVRDKSAAESKNRRLAEKVATLEAEKTDLRRRMAEERREANQAVTEAQAAQAEAMVALAKGSLASQRAEEWEARFNALRSRVDKAETSVRSEVVRTHAQLVEAYRNLGARTVDFDVPDHEASLRFLEWLQEELLVLPTIVQGFMSYASLVTCEGAMNALSREGCKHYEVFDQSDENFEHEIFKVEDPVVKDSVGALFDWMWGPHGREVVRERSDWAREQMARAEDVEDLGDLNGARPEAEVDSTLPSEAGEGSSAAPVSTVSSEGSFPAPAPMAEDPSKAVEELAAEDPMAVAGPSQVQDFGPAHATATDTAIFVAASTVVAGNESDDSVSKFFESDDSGSSVVWTEESSDEDLDYFAALDVAAAEASPRVTDADVFPGPSAGRRW

SEQ ID NO: 83290 - protein, 124 aa, Zea mays
  Coding DNA Sequence Number=SeqID_41511
MRYHIQKKERIILGRRTRNEDLREDYFQKSTQSSGATPIGCTFGAPHELPFQAKIVPTSKAWDKIKDTADPQPKHKSKMKVISDEDLRVDYFPKSTRSSGATPIGCTSGAPDEVQGPTRRNADL

SEQ ID NO: 83291 - protein, 58 aa, Zea mays
  Coding DNA Sequence Number=SeqID_41512
MPTSKAEKITFNKKTRKEDLRVDYPQKSTRSSGATPIGCTFGAPHELPFQAKIVPTSK

SEQ ID NO: 83292 - protein, 316 aa, Zea mays
  Coding DNA Sequence Number=SeqID_41513
  Gene Ontology: Mol. function=N-acetyltransferase activity; Biological process=metabolic process
  Homolog annotation: Hit_ID=Q10RP2; Match level="QueryCoverage=66%, HitCoverage=92%, E-value=4e-91, Identity=80%"; Hit description=GCN5 -related N-acetyltransferase, putative, expressed
  Pfam annotation: Domain name=Acetyltransf_1; Domain location=208-286; Score=54.5; E_value=3.4e-13; Accession=PF00583.14; Description =Acetyltransferase (GNAT) family
  Pfam annotation: Domain name=FR47; Domain location=199-296; Score= -8.4; E_value=0.081; Accession=PF08445.1; Description=FR47-like protein
  Pfam module annotation: Pfam domain module=Acetyltransf_1::FR47; Domain location=208-286::199-296
MAADLAYHGKSMSTDATGLATAVGVDDATATGAGGERGKGEWWWSLASSATEAPEPGLGRPQGAPACSGPSTGDGGGWDATANACEDSGAEMAAAPCSTTFSGDVWAELRLASASDVPHIHRLIHQMAEFELLTDLFAATEELLTSTLFPSPTPPPFTSFTALILDLSPSPVAPDPSSTIASRRLDLSASPLADPEAAAFASPRGGGRVTAGFVICFPNYSTFLSKPGLYVEDIFVRAPWRRRGLGRMMLSAVAGRAAELGMGRVEWCVLDWNKNAIDFYEGMGADVLPQWRICRLAGKALDKYKGSAGGKAAAAE

SEQ ID NO: 83293 - protein, 225 aa, Zea mays
  Coding DNA Sequence Number=SeqID_41514
MHRAIAVAQCATIYSAHAKINGQKVVFPAQTTLQRRGFADDRPQALAGDSPPSLIKPEVTYSILESKRMQGQCRYLESGHRTTWPRQRAWTRRCFDSGDKSTRLRPSILRSVPGNTNRRVTATQPQGATVIGSRRSSSSVGVLPRSSSQSPIPRSQYTAMLRTRPTHNSLTRLAPRLCSNPRPRRRFAQPPAAPYIDDGRRIAAAFYRRREGEDSFNGFQGSRQS

SEQ ID NO: 83294 - protein, 181 aa, Zea mays
  Coding DNA Sequence Number=SeqID_41515
MHRAIAVAQCATIYSAHAKINGQKAVFPAQTTLQRRGFADDRPQALAGDSPPSLIKPEVTYSILESKRMQGQCRYLESGRRTTWPRQRAWTRRCFDSGDKSTRLRPSILRSVPGNTNRRVTATQPQGATEIGSRRSSSSVGVLPRSSSQSPIPRSQYTAMLRTRPTHNSLTRLAPRLCSNP

SEQ ID NO: 83295 - protein, 376 aa, Zea mays
  Coding DNA Sequence Number=SeqID_41516
MVRVRLAHGKKNLVREDSIQGDGIVDIAPQHITLSQRSKSYMYHKNKHSGMQVTLGTGFQSVKSTFVFRNEKFIGSSNAGIPCRTAIAAKSSRGPPYTDHSPTALAPFGEKAIAKGYRQPWTTRSHPNGSDLISPDLIVPDQCRSYGPGQPMHRAIAVAQCATIYSAHAKINGQKAVFPAQTTLQRRGFADDRPQALAGDSPPSLIKPEVTYSILESKRMQGQCRYLESGRRTTWPRQRAWTRRCFDSGDKSTRLRPSILRSVPGNTNRRVTATQPQGATVIGSRRSSSSVGVLPRSSSQSPIPCSQYTAMLRTRPTHNSLTRLAPRLCSNPRPRRRFAQPPAAPYIDDGRRIAAAFYRRREGEDSFNGFRGSCQS

SEQ ID NO: 83296 - protein, 106 aa, Zea mays
  Coding DNA Sequence Number=SeqID_41517
MVRVRLADGKKNLVREDSIQGDGIVDITPQLITLNQRSKSYMYHKNKHSGMQVTLGTGFQSVKSTFVFRNEKVGVHVKCKAYQKGWLELSIAFKVGQILLAVTKYK

SEQ ID NO: 83297 - protein, 114 aa, Zea mays
  Coding DNA Sequence Number=SeqID_41518
MEELGSRSYKAHKNNIKKPTRGCQTSTKGSYKAQKNDIKKPSTTARPPPRGCWKQEKSLWKRDCFLQPKSAQSGCTGLSGGAPDSVWCTRLALANLLVSGLRRRCMTINHRTVR

SEQ ID NO: 83298 - protein, 196 aa, Zea mays
  Coding DNA Sequence Number=SeqID_41519
  Homolog annotation: Hit_ID=Q65XK2; Match level="QueryCoverage=22%, HitCoverage=7%, E-value=1e-14, Identity=88%"; Hit description =Putative CTP synthase
  Pfam annotation: Domain name=Ribosomal_L29e; Domain location=69-106; Score=27.6; E_value=4.4e-05; Accession=PF01779.7; Description =Ribosomal L29e protein family
MARGVMLHAPLAPEISNLVKKALKSALTHLKADHEGDFLSRYGQRIPHEAFGFDTSWPITDEGFTMAKSKDHMAHNQSYKAHKNNIKKPMRGCQTSTKGSYKAQKNDIKKPSATARPPPRGSRASLMRLGSCVVGSVHEEHWFSLIYFFRFCQALLHASVALDRKLVVDWVPSCDLEDSAAEENLDAYEKAWELLK

SEQ ID NO: 83299 - protein, 86 aa, Zea mays
  Coding DNA Sequence Number=SeqID_41520
MVRERRTQTNTMSKNTRDTRFIPRFGHTTKVPYFLVEAPTKSWVSFNPNPTFADHKGLKTGFQKAAHSFLADTTDWQKKVNSAKTG

SEQ ID NO: 83300 - protein, 60 aa, Zea mays
  Coding DNA Sequence Number=SeqID_41521
MDAQYDMTQEWLDRVKIARKGLRGTKRRFNRFYNRFNRFLHCSPFFCQSAVSAKKLCATF

SEQ ID NO: 83301 - protein, 284 aa, Zea mays
  Coding DNA Sequence Number=SeqID_41522
MAGSKDSSEVSTSNIINPTWETLPAEEQLLFEERQEQLIQEAKAKFLADFKVDRNNKVVRQRATDLASLRPTTNTPNVPKGSTQTNIKNKLGFKRRSKKETEVFPGLAHRTVWRSSAIIHRTVRCTTELSDVPPDYSVHQQSNGYLRTTVDSDGGLQLKLATFGNFQRHSAIIHRTVRCTPDSVRCSKEESPQELASLGKTPRLLRYNSPDCPVYTGLSGEPAEQRLLRANGHLQAHSMRARSARESCTPILAHRTLNSTCPMCTGHPGGPRRQKLQRSESNGI

SEQ ID NO: 83302 - protein, 324 aa, Zea mays
  Coding DNA Sequence Number=SeqID_41523
MAGSKDSSEVSTSNIINPTWETLPAEEQLLFEERQEQLIQEAKAKFLADFKVDRNNKVVRQRATDLASLRPTTNTPNVPKGSTQTNIKNKLGFKRRSKKETEVFPGLAHRTVWRSSAIIHRTVRCTTELSDVPPDYSVHQQSNGYLRTTVDSDGGLQLKLATFGNFQRHSAIIHRTVRCTPDSVRCSKEESPQELASLGKTPRLLRYNSPDCPVYTGLSGEPAEQRLLRANGHLQAHSMRARSARESCTPILAHRTLNSTCPMCTGHPGGPRRQKLQRSESNGIGDVAGAPDMSGAADCPMYHRTVPVHQRSNDYLRTTVDSDG

SEQ ID NO: 83303 - protein, 234 aa, Zea mays
  Coding DNA Sequence Number=SeqID_41524
  Pfam annotation: Domain name=IQ; Domain location=142-162; Score=27.5; E_value=4.6e-05; Accession=PF00612.17; Description=IQ calmodulin -binding motif
  Subcellular localization annotation: CTP_CleavageSite=103; ConfidenceScore=5.78e-01
MASAANFATSSWQPASPSPWTAPYATFVMPSWQPPSPSPWAASSANFVTTSWTPACPSLGTTPNFVTSSSLTASPSPWATPLGAATAQQSPTPSMGDLSINIRADLAKMQATLQKVEQGLLQIKVAVQHEQHQLALSAWLQTSAVVGIQAAARGFLARRRVRDMRRQMLEAALVTAATRAPPLVIVATYSRCPSMCSPFIQMASMGSRWLHTCKSNARRLEDELLVQERCSVRA

SEQ ID NO: 83304 - protein, 129 aa, Zea mays
  Coding DNA Sequence Number=SeqID_41525
  Pfam annotation: Domain name=IQ; Domain location=22-42; Score=27.8; E_ value=3.8e-05; Accession=PF00612.17; Description=IQ calmodulin -binding motif
MADLWTNIRAELAKMQAMLQKTSAAIGIQAAARGFLARQRVREMRRQMLEAALVTVDLGTRGRNLALSDDHQQRHRAAISKCEHGTCHAGDEIQLYGSDSKEGTPLVIGKGALLSATTFRYRPRRGRLH

SEQ ID NO: 83305 - protein, 335 aa, Zea mays
  Coding DNA Sequence Number=SeqID_41526
MVGACLPVEHWHVVALSGGSKHSSSRMGVFIGLFEGRWSKYDSTPGYQLYSRDISYNRGEASRIRDEYSAPRSTGALFRQRTGQAACPLRNKCEGRAAQSPYVILRPLAYVTDNKPCDSIRPSTEWGAEVLRIEPGHTSIPDPCLGHDTSFPGTLLWVVRSSLGGVRTLSNGFGLLYFGGPGCAHRGPVSSGPDGVVSENATSTAHEILLGLFSARLRVVAEASCLHTVVRGTPNPGGDSAIIHRTVWCTPDSVRCAKGGRPQELASFGKLQRLVRYNSPDCPVCTGLSGAHRTVRCDSGATVFSAPTALCRAFNARSARADGRRAHSGTPDKEQ

SEQ ID NO: 83306 - protein, 115 aa, Zea mays
  Coding DNA Sequence Number=SeqID_41527
  Subcellular localization annotation: CTP_CleavageSite=54; ConfidenceScore=5.16e-01
MGAQEQRADRQSNSGPTCRLTSSHEAGSGATVGGAKVTLQTAHLSNPLSKQCVRATRCTVLIPYTRSFPLHAEISGVRAHEDYTSMASRSSILPFVPEPMCRGSCNTPGVTVTKT

SEQ ID NO: 83307 - protein, 301 aa, Zea mays
  Coding DNA Sequence Number=SeqID_41528
MNDNNRHGDPMRLRKGFDDTATGRARDSATLDGQRELGAALEREMEVDRSKGARREMGAELEGEQGGTCGWGRSRGSAAREKKVLGGGAAGRAPSQPWNSPGRGLALVSTAARRRADLKLYHATVLVSLFHGRHAFASVFLCGLRFPQPPAPAPARPCPLPALLPCSLSSYSLRSQPPSNHQTPSPMALALLSSVFLLVRLQVPWRSTLLSGLQLASCQPGLTAAVAPGTATRRFSAVASTAHHSSLSFSGARQHASRHQLSARHRTKSVQEDVRCTFPRTVAGKKNSSTRQLGKATNSKL

SEQ ID NO: 83308 - protein, 107 aa, Zea mays
  Coding DNA Sequence Number=SeqID_41529
MACTTDQCDLPHGYALEPYEVGAGRCTQCSPSNGRREEEQQHASTWEGDEQQAVDDHASSREDAPQKSDRPHTRASVSLRSVISEACSPTLSVLAEDGTGMCCLQFA

SEQ ID NO: 83309 - protein, 127 aa, Zea mays
  Coding DNA Sequence Number=SeqID_41530
MEEGRTLPVMRISHANCKQHIPVPSLRAQREWESRPPKSPTAEIHLHGAFQILPPPIASQVTHTRCTKVGPLIYDAPIEKIKIHYWTQLLCRVLVLQALDKVFAKCDSRQRGLGELYIGNGFFADFA

SEQ ID NO: 83310 - protein, 154 aa, Zea mays
  Coding DNA Sequence Number=SeqID_41531
  Subcellular localization annotation: CTP_CleavageSite=8; ConfidenceScore=5.47e-01
MAAPGLPRSSHVSSVRHVAVCPICLAPAVVSVRAQQHRQSSPSYPVHGHTSSPRRGLPTFSLPPPYEVGAGRCTQCSPSNGRREEEQQHASTWEGDEQQAVDDHASSREDAPQKSDRPHTRASVSLRSVISEACSPTLSVLAEDGTGMCCLQFA

SEQ ID NO: 83311 - protein, 285 aa, Zea mays
  Coding DNA Sequence Number=SeqID_41532
MVKGVYPVHVRRRVLELRTFLKTSWGYFLTINAGPKREECEPPHKERATALRLYALSSPPQPAVKEANRRTRSVQPPPRLHCNRWSNLWHGGLDPHVMQPAHRFLGAEKLHRRSRQYLASSRPSQKTEVINFQNQCSDSRHPAHGPTKTLSAEVTGQSAAGTSVAVGVAMGRPAVIASTGAQEKRANRQSNFGPTCRFAYSFEAGPGATVGTLNQGYPLLQYEDAVPLKGHHVARKNDTSRMYQSNRTSVREHRTPLRTTRTPDYSSGLPSKHAEPLGWGPDPSE

SEQ ID NO: 83312 - protein, 80 aa, Zea mays
  Coding DNA Sequence Number=SeqID_41533
  Subcellular localization annotation: CTP_CleavageSite=64; ConfidenceScore=5.03e-01
MKEHRTPVRTTRTPDYGSGLPSGTRAILQSAHLSNPLSNSAPVLQGALCSSSLIQEASPACQCYADLRRQGIRRLPQQQA

SEQ ID NO: 83313 - protein, 153 aa, Zea mays
  Coding DNA Sequence Number=SeqID_41534
MGVGKGRLDGWKCLLNALRLFSDHGWSIKRKREPTPPLEDFGDSEYSEEEFSSESEGSPAPFSPPASSDDSDDSQGIAAEVWTYIRAVERSGLEGSDESKYSSDEEDSDGGEDEDDDDDDDDGDDDDGGDGDGDGSGSGGGSGGGDGSKGEST

SEQ ID NO: 83314 - protein, 88 aa, Zea mays
  Coding DNA Sequence Number=SeqID_41535
MGVAPDLQMDFLRIIHSKVILLLVKIVMKLFALCFGGIYCVLCTDVTVLKNILIIPGRPPPMGVGKGRLDGWECLLNALRLFSDRGWK

SEQ ID NO: 83315 - protein, 836 aa, Zea mays
  Coding DNA Sequence Number=SeqID_41536
  Gene Ontology: Mol. function=oxidoreductase activity, acting on single donors with incorporation of molecular oxygen, incorporation of two atoms of oxygen; Cellular component=chloroplast; Biological process=abscisic ...
  Gene Ontology: Biological process=acid biosynthetic process
  Homolog annotation: Hit_ID=O24592; Match level="QueryCoverage=69%, HitCoverage=96%, E-value=0.0, Identity=89%"; Hit description =Viviparous-14
  Pfam annotation: Domain name=RPE65; Domain location=336-829; Score =961.6; E_value=3e-286; Accession=PF03055.6; Description=Retinal pigment epithelial membrane protein
MDNIDEVTDRRVIALGAIEKDKIMDARVYNKKVKAKSFQVGGLHGARTPGRAHAVARQVISPWRTDVAAVQSPPERRAVKAGKRTPAAVRAMLRLHCQHLTNFDEGPPAALSPCSLAGSRRHRFFVADQQARSTTLFCDRGNRLEPRAHIVCPTVPGRGENKPEAGICAPAGFGRRRFVPGSGSGSGSVSARSSRRIRISTPGTSLGGHRLESRRTRVLSDSYCGQQGKLLPTKIPYDYDYEEQHQHQHQPATGTRARASNSVRFSPRAVRSVPHECLQAPFHADLPAPSKKPTAIAVPRHAAAPRKSGGGGGKKQLNLFQRAAAAALDAFEEGFVANVLERPRGLPSTADPAVQIAGNFAPVGERLPVHRLPVSGRIPPFISGVYARNGANPCFDPVAGHHLFDGDGMVHALRIRDGVAESYACRFTETARLTQERAVGRPVFPKAIGELHGHSGIARLALFYARAACGLVDPSAGTGVANAGLVYFNGRLLAMSEDDLPYHVRVADDGDLETVGRYDFDGQLGCPMIAHPKLDPATGELHALSYEVVRRPYLKYFYFRPDGTKSDDVEIPLAQPTMIHDFAITENLVVVPDHQVVFKLQEMLRGGSPVVLDREKTSRFGVLPKRAADASEMAWVDVPDCFCFHLWNAWEDEATGEVVVIGSCMTPADSIFNESDVRLESVLTEIRLDARTGRSTRRAVLPPSRQVNLEVGMVNRNLLGRRTRYAYLAVAEPWPKVSGFAKVDLATGELARFEYGEGRFGGEPCFVPMDPAAAHPRGEDDGHVLAFVHDERAGTSELLVVNAADMRLEATVRLPSRVPFGFHGTFITGAELEAQA

SEQ ID NO: 83316 - protein, 601 aa, Zea mays
  Coding DNA Sequence Number=SeqID_41537
  Gene Ontology: Mol. function=oxidoreductase activity, acting on single donors with incorporation of molecular oxygen, incorporation of two atoms of oxygen; Cellular component=chloroplast; Biological process=abscisic ...
  Gene Ontology: Biological process=acid biosynthetic process
  Homolog annotation: Hit_ID=O24592; Match level="QueryCoverage=99%, HitCoverage=99%, E-value=0.0, Identity=89%"; Hit description =Viviparous-14
  Pfam annotation: Domain name=RPE65; Domain location=101-594; Score =961.6; E_value=3e-286; Accession=PF03055.6; Description=Retinal pigment epithelial membrane protein
  Subcellular localization annotation: CTP_CleavageSite=23; ConfidenceScore=5.44e-01
MQGLAPPTSVSIHRHLPAGSRARASNSVRFSPRAVRSVPHECLQAPFHADLPAPSKKPTAIAVPRHAAAPRKSGGGGGKKQLNLFQRAAAAALDAFEEGFVANVLERPRGLPSTADPAVQIAGNFAPVGERLPVHRLPVSGRIPPFISGVYARNGANPCFDPVAGHHLFDGDGMVHALRIRDGVAESYACRFTETARLTQERAVGRPVFPKAIGELHGHSGIARLALFYARAACGLVDPSAGTGVANAGLVYFNGRLLAMSEDDLPYHVRVADDGDLETVGRYDFDGQLGCPMIAHPKLDPATGELHALSYEVVRRPYLKYFYFRPDGTKSDDVEIPLAQPTMIHDFAITENLVVVPDHQVVFKLQEMLRGGSPVVLDREKTSRFGVLPKRAADASEMAWVDVPDCFCFHLWNAWEDEATGEVVVIGSCMTPADSIFNESDVRLESVLTEIRLDARTGRSTRRAVLPPSRQVNLEVGMVNRNLLGRRTRYAYLAVAEPWPKVSGFAKVDLATGELARFEYGEGRFGGEPCFVPMDPAAAHPRGEDDGHVLAFVHDERAGTSELLVVNAADMRLEATVRLPSRVPFGFHGTFITGAELEAQA

SEQ ID NO: 83317 - protein, 311 aa, Zea mays
  Coding DNA Sequence Number=SeqID_41538
  Homolog annotation: Hit_ID=Q6QP51; Match level="QueryCoverage=13%, HitCoverage=19%, E-value=2e-10, Identity=76%"; Hit description =Putative growth-regulating factor 1
MEAQAHASCNRRAECFVHATAPPLAPLPCLLDCGANTATRGDPAHDPAAPAWRGGQCGQKWAGSNGGGRRAGAAATSRGGRRFAFAIMTESKKGPGKGDAPKRILPREGTRLRASLLIRGSKAGPSEGFDSRLRSRGPYTHYWSEVRRLAPRKGSTAASGYSGSAPITDQGFEGWPPKGHFRDQRERSCNGIPSEGGIEPSDPVARGPGPTDHPQLTGDTMFGAHRGQHGAFPLLLAERRRRGVCKKVESVPDCPLALCRGSGAALANLAPAEPLTASTYQPENLGPDRTPGLRPARMRERPDQPKHYARH

SEQ ID NO: 83318 - protein, 268 aa, Zea mays
  Coding DNA Sequence Number=SeqID_41539
  Gene Ontology: Mol. function=kinase activity
  Homolog annotation: Hit_ID=Q6QP54; Match level="QueryCoverage=57%, HitCoverage=42%, E-value=1e-22, Identity=43%"; Hit description =Putative kinase
MALSPSSLRKGDAGAYETSRENSAACAAPTAVPPVRVRLTAAKTGLRRHRKLRLAQPQGSDPTSTSDDGLRLARPQGSDSASTPEDGLRLARPQGLDSASTPEDGLRLARPQGSDSASTPEDDLRLARPPGLGLNLDPRRRSSPRPTPGLGLNLDLGQRSPPRPTPGPGLSLDLGGASASPDLGLEPTTSQGGAIIILPLASSGYGEQDRRPIWLAPVKHVMMAPRVLHDDDGSQPLTEARRRQQGSDSPDSCTSTGLKRSSYGHDIT

SEQ ID NO: 83319 - protein, 89 aa, Zea mays
  Coding DNA Sequence Number=SeqID_41540
MTQRRPGATVADLRSCTEDGGWRGRGRVGFWAQVARGGAVASSTRDVGAEKAAARNSGGGYAGMTGLTARAREQRERGKRGRARGRRLR

SEQ ID NO: 83320 - protein, 254 aa, Zea mays
  Coding DNA Sequence Number=SeqID_41541
MGQRTLAFTKLLIRDFLCNFLRKHGLLVVYAGPGGQRGVWGNGPRPLDLRRTARVGLSLIETGPPDLGWAAGIRWPALASPMASRGGGARPRGGELAGDEGRGGPCGSLGRPGRPERLGKARGVFWWGLGRGRGTGGGRSTAKRLGGGAKGLRRAIERDRRQYKGREGAGEVPYLKADSGDSSVAAMARRRPGSTVADLRGCTEDGGTGEVREGSAGAQMREGERASGVLGSSGRGRGGCELHARRGRGDRDNA

SEQ ID NO: 83321 - protein, 131 aa, Zea mays
  Coding DNA Sequence Number=SeqID_41542
  Gene Ontology: Cellular component=cellulose and pectin-containing cell wall
  Homolog annotation: Hit_ID=Q8L9P8; Match level="QueryCoverage=68%, HitCoverage=68%, E-value=2e-12, Identity=46%"; Hit description=RALF
  Pfam annotation: Domain name=RALF; Domain location=58-128; Score =104.7; E_value=2.7e-28; Accession=PF05498.2; Description=Rapid ALkalinization Factor (RALF)
  Subcellular localization annotation: CTP_CleavageSite=41; ConfidenceScore=5.26e-01
MARLGAGGRVDAPAGCRRRRPRSSRCRPRPSSIPGQRSSKCSGAVGECGVDEEEELGLSGGGGIGAGDALRRTLAQRKPTNRYISYAALRADQVPCNKRGRSYYTNCAAQTAANPYRRGCSAITRCARSMN

SEQ ID NO: 83322 - protein, 110 aa, Zea mays
  Coding DNA Sequence Number=SeqID_41543
MEAKRWGWAERRELHGEGARSARETPGWGREERGGHGGGELRAMEMGTRHAGELWPALELQRSSAGREAAQGAGPRASKGGRRPGLEDAAARDACAGNSTTAAMGRREGS

SEQ ID NO: 83323 - protein, 889 aa, Zea mays
  Coding DNA Sequence Number=SeqID_41544
  Gene Ontology: Mol. function=helicase activity; Cellular component =mitochondrion; Biological process=metabolic process
  Homolog annotation: Hit_ID=Q69L95; Match level="QueryCoverage=78%, HitCoverage=93%, E-value=0.0, Identity=80%"; Hit description =Putative fertility restorer homologue
  Pfam annotation: Domain name=PPR; Domain location=107-141; Score =23.9; E_value=0.00056; Accession=PF01535.11; Description=PPR repeat
  Pfam annotation: Domain name=PPR; Domain location=142-176; Score =13.1; E_value=0.21; Accession=PF01535.11; Description=PPR repeat
  Pfam annotation: Domain name=PPR; Domain location=177-211; Score =24.9; E_value=0.00028; Accession=PF01535.11; Description=PPR repeat
  Pfam annotation: Domain name=PPR; Domain location=212-246; Score =20.5; E_value=0.0059; Accession=PF01535.11; Description=PPR repeat
  Pfam annotation: Domain name=PPR; Domain location=247-280; Score =24.4; E_value=0.00041; Accession=PF01535.11; Description=PPR repeat
  Pfam annotation: Domain name=PPR; Domain location=281-315; Score =43.0; E_value=1e-09; Accession=PF01535.11; Description=PPR repeat
  Pfam annotation: Domain name=PPR; Domain location=316-350; Score =47.5; E_value=4.6e-11; Accession=PF01535.11; Description=PPR repeat
  Pfam annotation: Domain name=PPR; Domain location=351-385; Score =45.3; E_value=2.1e-10; Accession=PF01535.11; Description=PPR repeat
  Pfam annotation: Domain name=PPR; Domain location=386-420; Score =47.8; E_value=3.7e-11; Accession=PF01535.11; Description=PPR repeat
  Pfam annotation: Domain name=PPR; Domain location=421-455; Score =34.0; E_value=5.2e-07; Accession=PF01535.11; Description=PPR repeat
  Pfam annotation: Domain name=PPR; Domain location=456-490; Score =43.5; E_value=7e-10; Accession=PF01535.11; Description=PPR repeat
  Pfam annotation: Domain name=PPR; Domain location=491-525; Score =49.0; E_value=1.6e-11; Accession=PF01535.11; Description=PPR repeat
  Pfam annotation: Domain name=PPR; Domain location=526-560; Score =36.2; E_value=1.1e-07; Accession=PF01535.11; Description=PPR repeat
  Pfam annotation: Domain name=PPR; Domain location=561-595; Score =40.5; E_value=5.7e-09; Accession=PF01535.11; Description=PPR repeat
  Pfam annotation: Domain name=PPR; Domain location=596-630; Score =41.5; E_value=2.9e-09; Accession=PF01535.11; Description=PPR repeat
  Pfam annotation: Domain name=PPR; Domain location=631-665; Score =31.6; E_value=2.7e-06; Accession=PF01535.11; Description=PPR repeat
  Pfam annotation: Domain name=PPR; Domain location=666-700; Score =22.9; E_value=0.0012; Accession=PF01535.11; Description=PPR repeat
  Pfam annotation: Domain name=PPR; Domain location=72-106; Score=10.7; E_value=0.41; Accession=PF01535.11; Description=PPR repeat
  Pfam module annotation: Pfam domain module=PPR::PPR::PPR::PPR::PPR::PP R::PPR::PPR::PPR::PPR::PPR::PPR::PPR::PPR::PPR::PPR::PPR::PPR; Domain
  Pfam module annotation: Domain location=:386-420::421-455::456 -490::491-525::526-560::561-595::596-630::631-665::666-700::72-10
MPPRSPPLAAAADVASVVTRCPHAEPSSELTASTIPAYRALIRELVSAGRLDDVDAALASARSHLAPDSLQPLYVASIQAYARAGRLRAAVDAFERMDLFACPPAAPAYNAIMDALVNAAYHDQAHKVYVRMLAAGVAPDARTHTVRLKSFCLTGRPHVALRLLRSLSERGCDAKPAAYCTVVRGLYAHGHGYNARHLFDEMLGRDVFPDVATFNNVLHALCQKGDVMESGALLAKVLKRGMSANKFTCNIWIRGLCEDGRLEEAVALVERMGAYVAPDVVTYNTLMRGLCKDSKVQEAAQYLGRMMNQGCIPDDFTYNTIIDGYCKSGMLQEATELLKDAVFKGFVPDRVTYCSLINGLCAEGDIERALELFNEAQAKDLKPDLVVYNSLVKGLCRQGLILHALQVMNEMVEEGCHPDIWTYNIIINGLCKMGNISDAAVVMNDAIVKGYLPDVFTFNTLIDGYCKRLKLDSALQLVERMWTYGIAPDVITYNSVLNGLCKAGKAKEVNETFEEMILKGCRPNAITYNILIENFCKINQLEEASGVIVRMCQDGLVPDAVSFNTLIHGFCRNGDLDGAYLLFQKLDEKGYSATADTFNILIGAYSSKLNMQMAEKIFGEMISKGYKPDLYTYRILVDGLCKAANVDRAYAHLAEMISKGFVPSMATFGRMLNLLAMNHRVSEAVAIIHIMVRMGVVPEVVDTILSTDKKEIAAPKILVEELMKKGITGAHEFSRRYRPCPVYYLQSELAPFSSSHGGCRRVPCASVARSRVFKPGSSSSLARPGSCSLRRFSTGRAPLQLQRRPELPCVPCAHLHSAQLPTSMAAALLPAPARRFSGRPSSLAMEFPTLCPAPALGFHPSRALLGFSGAGRRSKSPFQPTSLLVAPDG

SEQ ID NO: 83324 - protein, 57 aa, Zea mays
  Coding DNA Sequence Number=SeqID_41545
MKAFGAGFRIRPSEDDFSSWGIDTGRRGRGQLGGVEAEGGAGQEIGPFRPKLLMSCK

SEQ ID NO: 83325 - protein, 90 aa, Zea mays
  Coding DNA Sequence Number=SeqID_41546
  Homolog annotation: Hit_ID=Q6QP51; Match level="QueryCoverage=40%, HitCoverage=16%, E-value=2e-08, Identity=78%"; Hit description =Putative growth-regulating factor 1
MKAFGAGFRIRPSEDDFSSWGIGTGRRGRGQLGGVEAEGGAGQEIGPFRPKLLSYPGGWHSSRSGANSAVFLLERSVKGRSDCGHFDLAD

SEQ ID NO: 83326 - protein, 79 aa, Zea mays
  Coding DNA Sequence Number=SeqID_41547
MKFICLRPPVARAWIPEGEAEKQQTRGSASSFPKIPKLVDEEVRVDRMRGVRGLIGRFGSSNKRNITILKNVNGILKPS

SEQ ID NO: 83327 - protein, 1473 aa, Zea mays
  Coding DNA Sequence Number=SeqID_41548
  Gene Ontology: Mol. function=nucleoside-triphosphatase activity; Cellular component=integral to membrane; Biological process=transport
  Homolog annotation: Hit_ID=Q8GU84; Match level="QueryCoverage=93%, HitCoverage=98%, E-value=0.0, Identity=74%"; Hit description=PDR -like ABC transporter
  Pfam annotation: Domain name=ABC2_membrane; Domain location=1161 -1362; Score=153.4; E_value=5.9e-43; Accession=PF01061.14; Description=ABC-2 type transporter
  Pfam annotation: Domain name=ABC2_membrane; Domain location=543-756; Score=196.7; E_value=5.6e-56; Accession=PF01061.14; Description=ABC -2 type transporter
  Pfam annotation: Domain name=ABC_tran; Domain location=218-441; Score= 55.1; E_value=2.4e-13; Accession=PF00005.17; Description=ABC transporter
  Pfam annotation: Domain name=ABC_tran; Domain location=922-1108; Score=93.1; E_value=8.7e-25; Accession=PF00005.17; Description=ABC transporter
  Pfam annotation: Domain name=MMR_HSR1; Domain location=219-318; Score= -21.7; E_value=0.097; Accession=PF01926.13; Description=GTPase of unknown function
  Pfam annotation: Domain name=PDR_assoc; Domain location=761-828; Score=107.3; E_value=4.4e-29; Accession=PF08370.2; Description=Plant PDR ABC transporter associated
  Pfam module annotation: Pfam domain module=ABC2_membrane::ABC2 _membrane::ABC_tran::ABC_tran::MMR_HSR1::PDR_assoc; Domain location =1161-1362::543-756::218-441::922-1108::219-318::761-828
  Subcellular localization annotation: CTP_CleavageSite=20; ConfidenceScore=5.35e-01
MPMPESHPHAVAAAAAGLALASTSSRRSLSLGSSISQSFRQMDTEDPFGRAQSDHDDEENLRWAALEKLPTYDRMRQGILRRALDNDQQQQQRQSVEVVDIHKLAAGGDGGRALLDRLFQEDSERFLRRLRDRIDMVGIDLPTVEVRYHQLTVEADVITAGRALPTLWNAATNFLQGLIGRFGSSNKKNITILKNVNEWTVDAGPLVIGGSRFGDFLGWMTLLLGPPSSGKSTLMRALAGKLDKNLKVSGSITYCGHPISEFYPERTSAYVGQYDLHNAEMTVRETLDFSRRCLGIGARYEMIAELARRERDAGIKPDPEIDAFMKATAVQGQETNIITDLTLKVLGLDICADVIIGDEMIRGISGGQKKRVTTGEMLTGPARALFMDEISTGLDSSSTFEIVKFMRQLVHVMSETVMISLLQPPPETYNLFDDIILLSEGYIVYHGPRENILEFFESAGFRCPDRKGVADFLQEVTSKKDQQQYWYLDQEQYHYVSVPDFAERFKSFHACQQMQKELQIPFEKSKTHPAALTTRKYGLSSWESLKAVMSREQLLMKRNSFIYIFKVTQLIILALMSMTVFLRIKMPHGQIADGTKFFGALTFGLITIMFNGFAELQLTIKKLPVFYKHRDFLFFPAWTLGVANIILKVPVSFVESAVWVVLTYYVMGFAPAAGRFFRQFIAFFATHQMAMALFRFLGAVLKTMVVANTFGMFVLLIIFIFGGFVIRRNDIRPWWIWGYWASPMMYSQNAISVNEFLASRWAIPNNDTTIDAPTVGKAILKSKGLFTGEWGFWLSIGALIGFIILFNMLYLWALTYLSPSSGSNALVSEGEDDVNEMALEGRRKDARRSKDEISQVVSSDPGTNGGTNTLAQSRVTLPFQPLALCFNHVNYYVDMPAEMKEQGFTESRLQLLSDISGTFRPGVLTALVGVSGAGKTTLMDVLAGRKTSGAIEGDITLSGYPKKQETFARISGYCEQTDIHSPNVTVFESITYSAWLRLSSDIDDGTKKEVMALVELDVLRDALVGLPGVSGLSTEQRKRLTIAVELVANPSIIFMDEPTSGLDARAAAIVMRTVRNTVNTGRTVVCTIHQPSIDIFESFDELLLLKRGGQVIYAGELGRHSHKLVEYFEAIPGVPKITEGYNPATWVLEVSSPLSEARLNMNFAEIYASSVLYRKNQEVIKELSIPRSDNQDLSFPTKYSQNFYATYAATFFLGASNCITVQPVVSIERAVFYREKAAGMYSPLSYAFAQTCVEVIYTILQGILYTVIIYAMIGYDWKADKFFYFLFFITASFNYFTLFGMMLVACTPSALLANILITFALPLWNLFAGFLIVRPAIPIWWRWYYWANPVSWTIYGVVASQFGENEGELSVPGGTPVVVKQFLKDNLGIQHDLLGYVVLVHFAYVIVFFFVFGYSIKRCRAWISVEDYVVKVLTNGRYVPMYMTIGVEDYVRLALSIKLQGKNVIGVWTSSYS

SEQ ID NO: 83328 - protein, 353 aa, Zea mays
  Coding DNA Sequence Number=SeqID_41549
  Gene Ontology: Mol. function=lipid binding
  Homolog annotation: Hit_ID=Q9LTR5; Match level="QueryCoverage=52%, HitCoverage=13%, E-value=3e-52, Identity=49%"; Hit description =Similarity to bactericidal permeability-increasing protein
  Pfam annotation: Domain name=F-box; Domain location=112-159; Score =34.1; E_value=5e-07; Accession=PF00646.23; Description=F-box domain
MAEEKTTPESGAAAPGRILCRNVAGRLRLTYGPGRGLAPAASDRTLRQTNPFLSAPPHFHLHPPDSAACARPPVPRRRRLFRRPVLFVGHLASQLCSVGALGDLLMADRSDGPIGRLPEHLIIEILIRLPVYEWVQLACVNKHWASIFQGECVWQTAIARNWPSAGLRKRWPGPIPRGSARRRFQALYVSENLVPSGGEIDELVGHTYLYLKEQLERPVMPPSSILHGTIIDQFIACGNTGEKAHDLASKIWLAVIDSLEENQQTFLLLKRVAQEGEFFLPFPYSRSYRVLWRVFDKLFTDFRDCFSGAEYHDVLSTAKSRFQPASRSPAREADGSARVCAGQGVSARCRVEG

SEQ ID NO: 83329 - protein, 168 aa, Zea mays
  Coding DNA Sequence Number=SeqID_41550
MRHNESVPGILVLTWCFFFMRRQLSLAPVDVILRQEYNRLRIDLSNLKEAETCSVCIECCRLSYASISDNLSTTQNPTLHLDGKIINAYSGVKETRQGGRRQRTRLRRSGCPRPLQSRRGIGGSGREGHGSDESSHEDGDPAKGMADLAEKAAATWIRPGRPWQRRNQ

SEQ ID NO: 83330 - protein, 62 aa, Zea mays
  Coding DNA Sequence Number=SeqID_41551
  Subcellular localization annotation: CTP_CleavageSite=51; ConfidenceScore=5.10e-01
MKTMRSTSTNKIQVAQQKHVWVLTHRSKRSSRIASIGLKHMKHKSTELNPREALRAAFHAEV

SEQ ID NO: 83331 - protein, 176 aa, Zea mays
  Coding DNA Sequence Number=SeqID_41552
MEERRDLRVLPAMASTSTCCAGTASRLPANQQGCTRGHSLDESTALTPGVTSGGCCASGAKWRAVLEQKDGTGGLGTIALRFGAGRVGRQACETAGARAQSARCGLARGARGRGIGGGLRYLKPIDAILEDLLDLWVRTHTCFCCATLILLVDVDRIVFIEDANRTGARGKGIDRK

SEQ ID NO: 83332 - protein, 478 aa, Zea mays
  Coding DNA Sequence Number=SeqID_41553
  Homolog annotation: Hit_ID=Q6ZLP5; Match level="QueryCoverage=13%, HitCoverage=14%, E-value=6e-20, Identity=88%"; Hit description =Putative CBL-interacting protein kinase 23
  Pfam annotation: Domain name=Ribosomal_L21e; Domain location=260-352; Score=-13.1; E_value=0.003; Accession=PF01157.8; Description =Ribosomal protein L21e
MAPTLRATSVWRTRRSMREKEDNEEGDEGEGWGEVSPSEGKEGDGEEGDEQDGEDGEWEDEEVQLLAFSIADELFMRSKLFRSLLADSLDGFLPLAVGFRRANPLPPPTMSAALLRKAAVQALERWHHLFGAHYHQLRLAVEYLKESARVQFSGLRATVDARAARETRMQEIYAGKVEQLRENLASIKAEMDSSWDPATESMGMSSGAGDDGGATMDGSWDCAAKSRARGRDIIMPNLKSSVTTTASAVEYTDEVGSLEEAAKAKEAGVDGIIDQGREAGGHVIGQIIDYVDVKVNSTVHKGMTHMFYHGRTSRVRNTKCAIGVEINKQMLNCVDSRSIYDWVLVTTLAYGRLYMYKCKYNDLKKPNTYYVDSLGIVEILFKILVLNIFGEWIKLLLRESSAGHLCLSAVLLRLLVINNKCYDGVKGDMWSCEVIFFVLMAGYLPFEDSNLMSLYKKIFKADFSCALHKCKEALQKDT

SEQ ID NO: 83333 - protein, 125 aa, Zea mays
  Coding DNA Sequence Number=SeqID_41554
  Homolog annotation: Hit_ID=Q6ZLP5; Match level="QueryCoverage=22%, HitCoverage=6%, E-value=2e-08, Identity=96%"; Hit description =Putative CBL-interacting protein kinase 23
MAGYLPFKDSNLMSLYKKIFKADFSCPSCVPHCNARAYTYLVTEFDSLVPGASNINVTDSQIPLTVPNSHIGRDVVVHAAPGDLRKELLVFISVQLKISDYILVLGHRICFKFQQWSSEAHIHED

SEQ ID NO: 83334 - protein, 129 aa, Zea mays
  Coding DNA Sequence Number=SeqID_41555
  Subcellular localization annotation: CTP_CleavageSite=70; ConfidenceScore=5.14e-01
MAEPKKERSKGKALTSVRTWDDSSSDDEPPRTSSHRSSSHSSRSSHKCLMARGTFGLRSKLQCEEAQRIRRMAQSRSYAQGSFGLITEKGTDLKGKRLFRPRWTIIELLANVKGMGVILHGLRPVPINR

SEQ ID NO: 83335 - protein, 121 aa, Zea mays
  Coding DNA Sequence Number=SeqID_41556
  Subcellular localization annotation: CTP_CleavageSite=18; ConfidenceScore=5.48e-01
MKLWKETSRSSKITTSSRCGLAATPSRLPVKAVLSTFLFRTLIYCTFGLRSKLQCEEAQRIRRMAQSRSYAQGSFGVITEKGTDLKGKRLFRPRWTIIELLANVKGMGVILHGLCPVPINR

SEQ ID NO: 83336 - protein, 50 aa, Zea mays
  Coding DNA Sequence Number=SeqID_41557
MATLRRRAGGTSLGTSVAVGHASSVRSGVGIEQDIVIFFDYLRMRWLNVF

SEQ ID NO: 83337 - protein, 458 aa, Zea mays
  Coding DNA Sequence Number=SeqID_41558
  Subcellular localization annotation: CTP_CleavageSite=93; ConfidenceScore=5.34e-01
MKFRGRCWRQQHPVKGPVRPPRVRYPRYSSTSRREETSASSYPALATASPGAEPSSRRASPPASRQVSEKRACGGGSGGVELAPLRSEDARPTATEVPSEVPPARRRRVAIGKRLRRPPTSSKAAGKRKRSSSPPSSSSSIRSTEPDPRRPRVVQKRSCDIIDVVKSAFQPFNSPLVDELNRALVEIDDLAKDLEDVAVQTQWEVMSQYGSFLSQNDEQPMGTQHSEFPVDGQAEGSRTPAVPKKPTQRTKLANFTADEDTRTSLAASRFAAIEKKPFHFLHCWAILKDQPKWMDNHMGQQNQHGNANPTHSNTVDVDAKESVPSSFTSKRPLGRDSSKEKAKRTKSVDTSSSDSEFMTRMGDLSLECLSVYKTVVTTEEKKLDSMNKNERQKLLLEKKKLNLEKLRLERQKLKEDKEEEIMILSMDLSKCNPLLRKYYEAKQQEILARVTGSTSSGL

SEQ ID NO: 83338 - protein, 238 aa, Zea mays
  Coding DNA Sequence Number=SeqID_41559
  Gene Ontology: Mol. function=zinc ion binding; Cellular component =integral to membrane
  Subcellular localization annotation: CTP_CleavageSite=47; ConfidenceScore=5.20e-01
MDRQQGRAPRTHHLPLAAGRAAGKPRRRTSGTTYSRWPGFFVTIWIAAVMFKSNDILCKQTALKRERKIPVLVGITILFVVHVSGFYWCYKNEDLIRPLMMLPPKEIPPFWHAIFIILVNDTMGQMLTIVEYFLLLYRALLPTPMWYRFFLNKEYGSLFSSLTTGLYLTFKLTSVVEKTIQNERILYHVFPLYLTMAVTYMFAFWGNGCNFPIGKGWCVAAKERTSCFCARKKDAKDL

SEQ ID NO: 83339 - protein, 174 aa, Zea mays
  Coding DNA Sequence Number=SeqID_41560
  Gene Ontology: Mol. function=zinc ion binding; Cellular component =integral to membrane
RERKIPVLVGITILFVVHVSGFYWCYKNEDLIRPLMMLPPKEIPPFWHAIFIILVNDTMGQMLTIVEYFLLLYRALLPTPMWYRFFLNKEYGSLFSSLTTGLYLTFKLTSVVEKTIQNERILYHVFPLYLTMAVTYMFAFWGNGCNFPIGKGWCVAAKERTSCFCARKKDAKDL

SEQ ID NO: 83340 - protein, 60 aa, Zea mays
  Coding DNA Sequence Number=SeqID_41561
METGKQGAEGRSAKHRGQREVLDICWTANTGGKLGGHGRKGAELPALCSLDIKPNRIEIN

SEQ ID NO: 83341 - protein, 276 aa, Zea mays
  Coding DNA Sequence Number=SeqID_41562
MGERAQGLGRHGIQGGSWEASACLLQWRSWKGHRASSTEGPALLGKEAREGGRHGCWFPWEGERWCRQQRGRRKIAWGRLQGGAMASRQCGRAGRLPAPCRGRYHKGGHHGREGVGDLLLWGGAEHHGEEEEPGVRRKKEPGQGPPRPGWLKLELDRACDWAPWRQGNREPREGAPSTGGRGRCSTSAGQPTPEGSWAAMGGREPSSLHSARCAWKKTGREEMAARKKWRVGVQICQVSTPIYRSSPRVRVLNWAQLGWVGLAQTRNRAALNYFPE

SEQ ID NO: 83342 - protein, 47 aa, Zea mays
  Coding DNA Sequence Number=SeqID_41563
MSRAFEDYYIMDCGIISAPEAWGVLSNDETMEIVAYIEVDMILMVAI

SEQ ID NO: 83343 - protein, 91 aa, Zea mays
  Coding DNA Sequence Number=SeqID_41564
  Gene Ontology: Mol. function=protein phosphatase type 2C activity
  Homolog annotation: Hit_ID=Q1SGL9; Match level="QueryCoverage=65%, HitCoverage=15%, E-value=5e-10, Identity=55%"; Hit description =Protein phosphatase 2C-like
MALSCRPAHHPSEAQSAIQESSVLDMSRAFNDYYIMDCGVILEMEVTQRRTDSNDQFVILPTVGAWGVLSNDETMEIVAYIEVGMILMVAM

SEQ ID NO: 83344 - protein, 180 aa, Zea mays
  Coding DNA Sequence Number=SeqID_41565
MKNTSYFNYKMRTAHKKIAHIHVPTAVLWRRGARAAFSLIVTKERNNKTRLFHHLQQHGFENPEYGVYFCKSYPTKEKILKDMLACGIQDKADQESKTLFAEMLTNSGSLKIQFYYQVSQDQTGFTPTESTDTPPSNLLPQRVHATLAISPLPLCGVLSGIGPTEAKLTHDEACGQLKGP

SEQ ID NO: 83345 - protein, 167 aa, Zea mays
  Coding DNA Sequence Number=SeqID_41566
MEVKHPPTNTFNSLPPPLVPPSSRNNKTLLFHHLQQHGFENPEYGVYFCKSYPTKEKTLKDMLACGIQVPRKEMQQLFNTQLLSSNASSQVIKSFKQPRKGVNAPRLALCCRRLRVCDEDITCNMSTTTPSAPPHQAPLPSLAGPITRARARDLNSVMLLKNEGPEE

SEQ ID NO: 83346 - protein, 259 aa, Zea mays
  Coding DNA Sequence Number=SeqID_41567
MEKEPLDMVESSVRVIETHVDIIRSLVTDGVVDTSEPESVYTLKTTLFQIGDVCDMLEKCALSIKKYADSKRAKIIQDEALQYAKDDEAADDLEELPSLDLLTQADILEKYFGIEYDSDQSRECQVNELSSSTIGKWIYLMYLFSLVILMVPSSAYNLDYLIPILCLGLIWRMASAECLNRAGKHGADRSALSNAVRQRRHGCDVIMLKDPKKRLWPVIYHHYPLFVGGGGKLSHPGFRAPRPGREHNHQVCWDQVSHI

SEQ ID NO: 83347 - protein, 170 aa, Zea mays
  Coding DNA Sequence Number=SeqID_41568
  Pfam annotation: Domain name=B3; Domain location=18-92; Score=5.5; E _value=0.018; Accession=PF02362.12; Description=B3 DNA binding domain
MASAECLNRAGKHGADRSALSNAVRQRRHGCDVIMLKDPNKRLWHVIYHHCPLFVGFTEGWKHLVAANDLRAGDVCELVKGPDDEGYTLPTSPVSAISPSRDPNAGSLSFLVRPNLNGYTRRSQATAMSKPDKTFPLLILPVLPSLHNPGVEPYEFRLSDCPHSLEWLYY

SEQ ID NO: 83348 - protein, 236 aa, Zea mays
  Coding DNA Sequence Number=SeqID_41569
  Gene Ontology: Mol. function=transferase activity, transferring glycosyl groups; Cellular component=membrane; Biological process =cell wall biogenesis
  Homolog annotation: Hit_ID=Q69TW1; Match level="QueryCoverage=57%, HitCoverage=25%, E-value=3e-43, Identity=64%"; Hit description =Putative galactoside 2-alpha-L-fucosyltransferase
  Pfam annotation: Domain name=XG_FTase; Domain location=1-233; Score= -193.6; E_value=0.023; Accession=PF03254.4; Description=Xyloglucan fucosyltransferase
  Subcellular localization annotation: CTP_CleavageSite=21; ConfidenceScore=5.41e-01
MDDLVSNLDPRLATGGPGHVLLMAGPSRSRRLVPSSRRRRASGHGAVPVRGGAECNYLVWLPYNGLGNRMLSLVSTFLYALLSDRVMLVHFPADFTDLFCEPFPDATWVLPPDFPVANLSDLGMNHEQSYRNLLASKKIANDPMVQSSVPPPWVFLNLCHEQDIDKLFYCSDDQLALAKVSCLLLFSGLAGRVCGLGLARATKWAVLSGSARHDRAYTVPCSGRSLGPSGGTARHG

SEQ ID NO: 83349 - protein, 284 aa, Zea mays
  Coding DNA Sequence Number=SeqID_41570
  Gene Ontology: Mol. function=transferase activity, transferring glycosyl groups; Cellular component=integral to membrane; Biological process=cell wall biogenesis
  Homolog annotation: Hit_ID=Q69TW1; Match level="QueryCoverage=47%, HitCoverage=25%, E-value=4e-43, Identity=64%"; Hit description =Putative galactoside 2-alpha-L-fucosyltransferase
  Pfam annotation: Domain name=XG_FTase; Domain location=3-281; Score= -167.3; E_value=0.0022; Accession=PF03254.4; Description=Xyloglucan fucosyltransferase
MPLRERVFVILAPDLGELAAICGAASSAENSPQDHKSLIPGRPNPSLSPTQPQPSTYNINTHRQTLTHPSSLSPSRSRRLVPSSRRRRASGHGAVPVRGGAECNYLVWLPYNGLGNRMLSLVSTFLYALLSDRVMLVHFPADFTDLFCEPFPDATWVLPPDFPVANLSDLGMNHEQSYRNLLASKKIANDPMVQSSVPPPWVFLNLCHEQDIDKLFYCSDDQLALAKVSCLLLFSGLAGRVCGLGLARATKWAVLSGSARHDRAYTVPCSGRSLGPSGGTARHG

SEQ ID NO: 83350 - protein, 628 aa, Zea mays
  Coding DNA Sequence Number=SeqID_41571
  Homolog annotation: Hit_ID=Q1T4D7; Match level="QueryCoverage=17%, HitCoverage=65%, E-value=1e-23, Identity=46%"; Hit description =Polyadenylate binding protein, human types 1, 2, 3, 4
  Pfam annotation: Domain name=RRM_1; Domain location=375-445; Score =90.7; E_value=4.5e-24; Accession=PF00076.12; Description=RNA recognition motif. (a.k.a. RRM, RBD, or
MKDVGDCTALLAAFVYIETSSAALRILWTIRVPHLTQTKTTPSTAATDPCCPISWSVRPTLPSFPTQISGMESRRGSSCGCTPASSNVASTDPDVPPDSDADNIIIINGKGPIELVFGNTTIGGLGDVSTVLDPVVGGVPIAQEEVITSTMPQAAHKAPDDLELGLPDYYGAGCRHPLTSRVVTLLYRVPELLLGSNSPKAKSLLEAALMEANRERKKHITGTMTTKPNDDDDLDKDDGELCLGGIYLELACAMEVQDCRHQMCVAFMLALCFNISMPNTIAPSAILKMAQPDGELLVSVGVPGNALVLKISIQGVVVALHRETLQGTSPNEEQMKQDSVADNFHCQLNKILADLNQDHIIDRKNVWNSIRFSNVYVKNLSDTVTDDELTEMFEKYGTITSAVVMRDNVGNSRCFGFVIFENADAAGQAIQELNRKIFNDKELYVGRVQQPMMPGNLYSSKFAVFGDKVFSPKEISAMIFGKMKDTAEAYLGKKINDAIVFVPEYFNDVQRQATKDAAITKVDIFRDAAVLVVNYVDEIRAQGFKLEYAVLPTPMDLINTVRELVLSQDITLIIEPGRFLVRADGQLFWALSSDASDAMICPDQERCDEIFQLFASFLGFKIKNQRSI

SEQ ID NO: 83351 - protein, 250 aa, Zea mays
  Coding DNA Sequence Number=SeqID_41572
  Gene Ontology: Mol. function=diaminopimelate decarboxylase activity; Biological process=lysine biosynthetic process via diaminopimelate
  Homolog annotation: Hit_ID=Q6ZG77; Match level="QueryCoverage=85%, HitCoverage=42%, E-value=1e-96, Identity=83%"; Hit description =Putative diaminopimelate decarboxylase
  Pfam annotation: Domain name=Orn_DAP_Arg_deC; Domain location=112 -220; Score=122.9; E_value=8.9e-34; Accession=PF00278.12; Description= Pyridoxal-dependent decarboxylase, C-terminal sheet domain
MSCRRRDLCATIAALCARLLPLPRAPPQPFPHALHSRDAAVLMLNYVDEIRAQGFKLEYLNIGGGLGIDYHHTDAVLPTPMDLINTVRELVLSQDLTLIIEPGRSLIANTCCFVNRVTGVKSNGTKNFIVVDGSMAELIRPSLYGAYQHIELVSPPTPGAEAATFDIVGPVCESADFLGKDRELPTPDEGAGLVVHDAGAYCMSMASTYNLKLRPPEYWLLHGIKNKNKATHVKKFEPWSLSYHFFEMLA

SEQ ID NO: 83352 - protein, 104 aa, Zea mays
  Coding DNA Sequence Number=SeqID_41573
MDYSAPAGSRWNLAPGGSPAVATTSAPGNLTSGGDHLCTDDLPAAATTSAPGSLPSGGDHIIVRAMAKRPSPPPSYGGEDKTIQAMELGARRQAMLAVWPGPRS

SEQ ID NO: 83353 - protein, 103 aa, Zea mays
  Coding DNA Sequence Number=SeqID_41574
MDYSAPAGSRWNLAPGGSPAVATTSAPGNLTSGGDHLCTDDLPAAATTSAPGSLPSGGDHIIVRAMAKRPSPPPSYGGEDKTIPSHGAGSTATGNACGLAGTA

SEQ ID NO: 83354 - protein, 262 aa, Zea mays
  Coding DNA Sequence Number=SeqID_41575
  Gene Ontology: Mol. function=DNA binding; Cellular component=nucleus; Biological process=regulation of transcription, DNA-dependent
  Homolog annotation: Hit_ID=Q7GCL7; Match level="QueryCoverage=83%, HitCoverage=41%, E-value=3e-20, Identity=35%"; Hit description=NAC domain-containing protein 74
MSLTRFNSPCLYVLSSSRWSVLSKNLQNPGSMAPNIRPGHASPIQDGTDATDYLFTDDLPEDLYSMLYPGTDQFNDSIFLEQTGQEGNNNQTNYMMGIGSYVLPNNFENETPNAELQLDHENNKMDMSNENNDTGITIRRRRATAPPANISLAAGKIKMQVGIKRMVTSNSESINQTMKFTDNSGRRLDLRTDVEHQKKNANNVISAKQSDAANHEAHSNQGYLEGFKRCSSAGFRAYIFVALFVVGVAALVLHYHRSNANL

SEQ ID NO: 83355 - protein, 182 aa, Zea mays
  Coding DNA Sequence Number=SeqID_41576
  Gene Ontology: Mol. function=DNA binding; Cellular component=nucleus; Biological process=regulation of transcription, DNA-dependent
  Homolog annotation: Hit_ID=Q7GCL7; Match level="QueryCoverage=81%, HitCoverage=30%, E-value=6e-66, Identity=76%"; Hit description=NAC domain-containing protein 74
  Pfam annotation: Domain name=NAM; Domain location=43-171; Score =251.4; E_value=1.9e-72; Accession=PF02365.6; Description=No apical meristem (NAM) protein
MVVDSLRVVGRSRRVLLLWADFELLDRICRRHCKMEVLRDMHLPPGFGFHPSDIELVSHYLKRKILGQKIEYDLIPEVDIYKHEPWDLPAKCNLPIKDNKWHFFASRDRKYPTGSRSNRATLAGYWKSTGKDRAIKLNKLTLGTKKTLVFHEGRPPSGRRTEWIMHEYYIDENGCKVSPDMK

SEQ ID NO: 83356 - protein, 748 aa, Zea mays
  Coding DNA Sequence Number=SeqID_41577
  Gene Ontology: Mol. function=DNA binding; Cellular component=nucleus; Biological process=regulation of transcription, DNA-dependent
  Homolog annotation: Hit_ID=Q7GCL7; Match level="QueryCoverage=60%, HitCoverage=90%, E-value=1e-92, Identity=42%"; Hit description=NAC domain-containing protein 74
  Pfam annotation: Domain name=NAM; Domain location=305-404; Score =143.7; E_value=5.1e-40; Accession=PF02365.6; Description=No apical meristem (NAM) protein
MHCTKSFFVESGHQPYFHPGSCDLAFLFTSTAWDASSGGSAAIAFSTKAAESKVAEAAEPGAPPDAADDSTLFIITSTSAAGLQEGQGRRLLCRCPPAVPPPADNTGGTSAEGGTQGRLAPQDKSSAASPPGSEPAAALGTGCVRIASNEPQANDHDLTHTSCRPIHPATRRLAPTQTSSAPTASWLLRPSRPIALPYYSLPTTLPLTLPPPSAATPSLDSSAGPNTALELFAVPPPGSSSPHGGAVLVVTRGAGRARSAVRAPGLRRGEPIPSSASTCRFCSSGAGALVGVRHCKMEVLRDMHLPPGFGFHPSDIELVSHYLKRKILGQKIEYDLIPEVDIYKHEPWDLPAKCNLPIKDNKWHFFASRDRKYPTGSRSNRATLAGRPPSGRRTEWIMHEYYIDENGCKVSPDMKDAFVLCRVTKRNDWSLDNDNEVGNRSSHLEQPDAATSVVSTVKPEDVAASVICPEESNHATTPIGSAELSNDVAQAAITPAAITPDSTTPNGGNELETWLQELLDPSPPFNLVADTGSADNLQNPGSMAPNIRPGHASPIQDGTDATDYLFTDDLPEDLYSMLYPGTDQFNDSIFLEQTGQEGNNNQTNYMMGIGSYVLPNNFENETPNAELQLDHENNKMDMSNENNDTGITIRRRRATAPPANISLAAGKIKMQVGIKRMVTSNSESINQTMKFTDNSGRRLDLRTDVEHQKKNANNVISAKQSDAANHEAHSNQALVVSGSIGFVLGVVR

SEQ ID NO: 83357 - protein, 301 aa, Zea mays
  Coding DNA Sequence Number=SeqID_41578
  Gene Ontology: Mol. function=protein dimerization activity
  Homolog annotation: Hit_ID=Q2QP98; Match level="QueryCoverage=86%, HitCoverage=32%, E-value=1e-22, Identity=28%"; Hit description=HAT family dimerisation domain containing protein
  Pfam annotation: Domain name=DUF659; Domain location=207-301; Score= -3.7; E_value=4.5e-07; Accession=PF04937.6; Description=Protein of unknown function (DUF 659)
  Pfam annotation: Domain name=zf-C2HC_plant; Domain location=58-113; Score=52.4; E_value=1.6e-12; Accession=PF07567.3; Description =Protein of unknown function, DUF1544
  Pfam module annotation: Pfam domain module=DUF659::zf-C2HC_plant; Domain location=207-301::58-113
MSKSSEESSVASGGAPGVGSAASATLDFAAFVEKAIAALPPELASQAVDVKRKAKSQDPGWKYGWWPDSTKKDFVQCIFCRKIIPSKIKRFKQHLTGGFGDTMKCGSVPELISKEMLAYLRKNARSLVVNVDEDGGEYESEGKKEQVAAEPSSGTKVKQAKKKINQSAISAFVVLAPPKSQTQKHSNQSWEIMLGSIGQYGPGYRSPSYHDTRVPLLDRAVDRTTELRKKHEEAWKEYGGSLMSDGWINMRQHDIINFLANSPVGTFFLESVDASCEVANAQMLVDLLEKQINKIGKEYVV

SEQ ID NO: 83358 - protein, 104 aa, Zea mays
  Coding DNA Sequence Number=SeqID_41579
MEALNVSWNGLLALVLNVEGPRKNDLTIYWALGPFVRSFTLLVDPGDIYPPQAPDLWVNLELRAGLLILPHTLEVGTISAWNDNPWGAPKVHPMGVAPDLQMDF

SEQ ID NO: 83359 - protein, 170 aa, Zea mays
  Coding DNA Sequence Number=SeqID_41580
MGCTGGAPNGCSPRPSNGFFKDNPFEEIGMKLFALCFGGIHCVPCTDVTVLKNILIIPGRPPPMGVGKGRLDDSQGIAAEVWTYIRAVERSGLEGSDESEYSSDEEDSDGGEDEDDDDDDDDDGGDGDGDGSGSGGGSGGGDGSKGSTRGGSSKGSTRVGGGGSSSKASG

SEQ ID NO: 83360 - protein, 246 aa, Zea mays
  Coding DNA Sequence Number=SeqID_41581
MERAEVMKRESVVVGGVFKGSPKADSRWEKRTKNRLNRSPVGAVLTEGERSEADASCRCQGDRGLGLIEPVCAMLRRRSTSSHHCPIVPGEAVGLGKWCYNSLAAESAPAGASLDGVRDAHSGEAYCRRDDEYSAPLGVGALFANRLGEAWTRAGTGPLLMLGSSSSRDPAKAWNGSGVPRGFGAIDAPRGRIIFPCHMVLLGLPMWWVGCCSLCDLEVSYGRNVFILQKREQPMKKGDLRSQEKL

SEQ ID NO: 83361 - protein, 348 aa, Zea mays
  Coding DNA Sequence Number=SeqID_41582
MAGACVEGTGPRAAPFIGARERERDGGDGEHRQARHDGGNGANGDCDGSGRRGVRGRLGYIGGVVAETGASLNGEATGREAIGDEHAVYAWNSVFAPSLPHVWVTIETPTLRSLRLVLSGPTGQRGYVSGIMLDRDSLVLLPWSGHGLVMSPRADVARWDKPSWQGHSCVTGDNQRSRGVAIARNHSLGALDHQRRDLHSIKLLYLTEDRATSTIKWYQISRLPSAFPELQLSLEQNMYSFAITPTLVGQSHRSPFATCSAGPKNQMDKEKRPKLNDDECVSQLELKEMMRVMTEAFKKYQDSAATSYEQLDRRVAELVTRMDVLEAHPPTNSSTSSLSCGRRRRRRR

SEQ ID NO: 83362 - protein, 166 aa, Zea mays
  Coding DNA Sequence Number=SeqID_41583
  Homolog annotation: Hit_ID=Q6QP51; Match level="QueryCoverage=22%, HitCoverage=16%, E-value=2e-08, Identity=75%"; Hit description =Putative growth-regulating factor 1
MAPEAGLGCCQPHPGGWHSSRSRAGDAVFLSGSEFSGWYVDAVNGLAVAKFARAAPEPLHRARGRSRTDSAFIIRLFVAFPQGGGGKAPCCPRRASNMVSPGPRARCLPLMGFRYRIAPAGLGNVLGYLRSVARASAMYRTYPESSLALRVLGRLSNPSGGQPSNP

SEQ ID NO: 83363 - protein, 227 aa, Zea mays
  Coding DNA Sequence Number=SeqID_41584
  Homolog annotation: Hit_ID=Q6QP51; Match level="QueryCoverage=31%, HitCoverage=24%, E-value=8e-15, Identity=60%"; Hit description =Putative growth-regulating factor 1
MTLGTSDTWPRLGLHSRGTLGHFRDQQERFCNGIPPEGGIEPSDPIERDRVRQITCRGSGAALATLATAKPLTASTDQPENSKPDHAPELPSDLMREQPDQPRHREAPPHPTLGLSLRRRSLPRPTSGLGPRLGLGRWSLPRPTLGLGSRLGLGRWSPPRPTPGLGLNLGLGRWSPPRPTPGLGLNLDLRRNRVLTPPRPRPQEESPPHPTLGSDRPRHRGYIITLP

SEQ ID NO: 83364 - protein, 100 aa, Zea mays
  Coding DNA Sequence Number=SeqID_41585
MEDAMSEQQERFREELRQQQITFLQQQLEYMAAYNAQAQQAMNRSGVIGHNMPPPVIPAPGGAYAGEGATTGENPNPLHDFVNEFFAYGGSGHNSNNPDM

SEQ ID NO: 83365 - protein, 100 aa, Zea mays
  Coding DNA Sequence Number=SeqID_41586
MEDAMREQQERFREELRQQQITFLQQQLEYMAAYNAQAQQAMNGSGVMGHNTPPPVIPAPGGAYAGEGATTGENPNPLHDFVNEFFAYGGSGHNSNNPDM

SEQ ID NO: 83366 - protein, 211 aa, Zea mays
  Coding DNA Sequence Number=SeqID_41587
MVTQDGDHQFDGGEKQAGLRPLPRPQLQGSSSFLLGRRHSREKALTGLAEGADFDNARPIGRKRRQLQRARFAGSVGSGVASGATSHRWAECGYLPAVRAVVALRAPGDRPRRCALLGRRSCSWAVLPLLRHDAFARRSVLARLGGLEWGSAGGQVAAVVGAEVVAAGEVLVTDEIAAAIRAPGLGSLALIACPRPSSGTWARALSQQRLP

SEQ ID NO: 83367 - protein, 130 aa, Zea mays
  Coding DNA Sequence Number=SeqID_41588
MPLQTGLRFRYRGYEQPPYQEARGTTNSKRLTAAHSCSSDNDLRSGRPNNSSDDLRADAAATRPSPTSPLEGRGQAIKAKEPEARSADGSGDLVGDEDFSGHLSAGRSPLKSSRTGEHRPPHEGVVPEQG

SEQ ID NO: 83368 - protein, 96 aa, Zea mays
  Coding DNA Sequence Number=SeqID_41589
MAMEEWSCCVAMDMDLAEQRERRNGSRLVEMGELGSMQMWSSPFGAVAGGVRDCCAVEADDHGRQRAEGMHAKEEEGWRGEKKWRWLGEKKMAARG

SEQ ID NO: 83369 - protein, 164 aa, Zea mays
  Coding DNA Sequence Number=SeqID_41590
MGEVCASEERRVELLLLWRRGSPCCWNFWALWEEEVDELLLAVEQERGAAAGQPWSRKVEVGRRWKKDAEHRGFGRPGCWPSREEHGKAPWEKLELAAMGESFSAPRKKERGGGAMAGRWELLAIWSSGRGVRDCYAVEADGHGRQRAEGMHAKEEEGWRGGDG

SEQ ID NO: 83370 - protein, 51 aa, Zea mays
  Coding DNA Sequence Number=SeqID_41591
MRSPCLTIDNAEQPFYTASKRRLRRSLSYIAAHAATRKERIQVYNGGVAEC

SEQ ID NO: 83371 - protein, 192 aa, Zea mays
  Coding DNA Sequence Number=SeqID_41592
  Homolog annotation: Hit_ID=Q1SGL9; Match level="QueryCoverage=25%, HitCoverage=12%, E-value=6e-07, Identity=57%"; Hit description =Protein phosphatase 2C-like
MYDKLRHSRRLDAVQSGCSALSIVKQGDLMVVANPSQESSVLSMSRAFDDYYIEDCGVILAPEVTQGRTDNNDQFVILATVGVHFLHGACTDGGGDDGRGSAGEHAEGLRSARLGRSSAKGGRQRREQAGCTGAGRKQGHRPPGQSSPAKEGVPKEGGAGRRTRTSEREAEGRRMTCERRERGGLPFMEDKL

SEQ ID NO: 83372 - protein, 344 aa, Zea mays
  Coding DNA Sequence Number=SeqID_41593
  Homolog annotation: Hit_ID=Q6QP51; Match level="QueryCoverage=57%, HitCoverage=92%, E-value=2e-44, Identity=50%"; Hit description =Putative growth-regulating factor 1
  Subcellular localization annotation: CTP_CleavageSite=46; ConfidenceScore=5.56e-01
MAAAGERKQQSNRLQAHVLSWSSRGALSHGVKTTRPCSVPRTARTTAAPRTTCPVALTSRQGKRHLWQAKRATFHLRHDDRVEKGTGKGDISKGILLREESGPQALLLIRAASEHSGSAPTTDQGFEGWPLEGFDSRPRARRARDDSGYVRYMAEARATLPSRQGRSDRSHFALPLIDLTGKQRRSPSSNAVPPARVRLTAAESSLRRHRKLRLARPWASASGEVSASPDPRARPPPRPRKVVSTLPDPRARPPPRPRKVVSASPDPRAWPQPRPRAESRPRPTPDSASGGVSASPDLGLGPTTPQGPLTEARRRQQGPDSPDSCASIGLKRSSDGHDTMYTGP

SEQ ID NO: 83373 - protein, 134 aa, Zea mays
  Coding DNA Sequence Number=SeqID_41594
MARRLYAVGEGSPAAPGGDGCLESRHRFRSREGAALAQVAVLASSFEVEILPPKSPSEAGPDSAEGGINTEGATAPSIDDLFVGSRIAYPSESYFSRKVMSEDPAIKAVEKRERCYGRKTFSEENFDAEGVPPF

SEQ ID NO: 83374 - protein, 297 aa, Zea mays
  Coding DNA Sequence Number=SeqID_41595
MHQGSLCKGYIVYPWPFTLVVKIGSVQPRLERDHDSWVKWPVSGALHGIPTTGGDPEGDRDDDDAGGSSSHGTELSEELEGWIARPITHDTARGCNFHDALDTLLRRAFDRHTWSIEYRCVVYQHRRRLYPDQWEATCFVRRPDDDLRGAEAFSEHYSITERDTAEAAMQDAARRALSQYCLLFSGVDDGLNLKYYPRRSTGSAGGVIVSPVGEGNPRLNNMVNLAAVLNIELDHALDELGKVWAEVAELCAECAARHYLDGGSPAPVGIQHPYRSPPHGRFDYGTPDCRTRIDLDP

SEQ ID NO: 83375 - protein, 90 aa, Zea mays
  Coding DNA Sequence Number=SeqID_41596
MGTTWGGVVCKARPRLYKPDLHYRGEWPGIHYVAFTKTPLVHICSLGFARHTNAVHLPKDVIGQRTLAFTRLLLRKVSNNTLRNLGLLVV

SEQ ID NO: 83376 - protein, 136 aa, Zea mays
  Coding DNA Sequence Number=SeqID_41597
MARVACTLRGKRLDGGVSVLSVGVNPFWERAQDSYHIAELSAEANALAQVAELSAALENLQAYCNNLHEEVHVLYDRLHPNVPPEVAAMGAGTSGAASGGPDGELDLFGAPPSMNLADERSPEAGSGAGVAKDEDN

SEQ ID NO: 83377 - protein, 117 aa, Zea mays
  Coding DNA Sequence Number=SeqID_41598
MAMMGSTSKKNTSVRERAQDSYHIAELSAEVAELSAALENLQAYCNNLHEEVHVLYDRLHPNVPPEVAAMGAGTSGAASGGPDGELDLFGAPPSMNLADERSPEAGSGAGVAKDEDN

SEQ ID NO: 83378 - protein, 120 aa, Zea mays
  Coding DNA Sequence Number=SeqID_41599
MTEWQHIVLSADKMDLIIVLGNLLDLISNMDLGLGLDLDLQFGSLIYRVVRLDWFVDYLHTFSSWAPIGEEAEGRRKYVIRPLFEADDVQLILEPEQLRTRAADQCVQLILEPEQLRTFL

SEQ ID NO: 83379 - protein, 237 aa, Zea mays
  Coding DNA Sequence Number=SeqID_41600
MALSSGSARELSQWKCFRLWDNYCVKNKRCVDECLGVEGKGYTHGHCELWACILHTPYSTKILGSCQEHLMQIALMQTSGQVNFKPLLGIAEIGTMMHAAICFAILRKPMASPRIEISSLSFENSYQLPRSLAETRRGEGRGSSSLLFGVGKARSTSCFQFTPWGSFSELKGTNRIHACTGHEIEIHGQWPALNKHYNSLFEADDVQLILEPEQLRTRATDQCVQLILEPEQLRTFL

SEQ ID NO: 83380 - protein, 187 aa, Zea mays
  Coding DNA Sequence Number=SeqID_41601
MVKARLTPWCSTPRSLLRTWLPKARRQQQRLPQGKRYCEKALAPVPHTRGEDKPLKPKSRRFGPQVALTVSLVEETTSAVGSLTYGDHCLSTDDSSHLRAEAAPANGGRPSAQGGPHSRPRYGREDNTIRGREHRPATYDVLCAPRCGPWCRKGRGCGRSAHCETVARAVDGQPHPDQAAGGSLPPP

SEQ ID NO: 83381 - protein, 59 aa, Zea mays
  Coding DNA Sequence Number=SeqID_41602
  Subcellular localization annotation: CTP_CleavageSite=22; ConfidenceScore=5.17e-01
MAGLRTARPSLVRWTDSHTPTRQQVAVCLLRGSPYSHPKASRAKSPPTRSRVSTLRHGG

SEQ ID NO: 83382 - protein, 261 aa, Zea mays
  Coding DNA Sequence Number=SeqID_41603
  Homolog annotation: Hit_ID=Q6QP51; Match level="QueryCoverage=81%, HitCoverage=94%, E-value=4e-45, Identity=51%"; Hit description =Putative growth-regulating factor 1
MAGLRTARPSPVRWTNSHTPTRQQVAVCLLRKAGIEKRGYFERILLSEGSGPRALLLIRGSKVAPYGVRQPPQSTQASSPLLIRGSKAGPLEGFDSCPRACRVRDDHEYVRYMAKARATLPSHFAPLLIVLTGKQHYSPRSDYCANHQGKTNDSKSRPPSSSASGAIGSSATPDLRPRPQPRPWEKVSASPNPRPRPQPRHWEKVSASPDLGPRPQPQPRPREESHPHPTSASASGEVSASPDLGLGPTTPLGIHDYHTPS

SEQ ID NO: 83383 - protein, 204 aa, Zea mays
  Coding DNA Sequence Number=SeqID_41604
  Subcellular localization annotation: CTP_CleavageSite=32; ConfidenceScore=5.59e-01
MVIGSRMDGSGSKSPRITSNGCGASPNSPSVYGGAARGSWRTIAGDNRSDATRPGTSPTIVQNVTRIKCRPQPSARNSESRLRLNPHREHTGEFPAQRRSSPTRFLDSTVTGLSMATEAYQWFARRQRGARWLASREGWTTLFNGEQGGMAPGQMSRRSESLAAPIAPRILGIPLRAHGFHGEEAQDLAHGLWREGPTRQRKRG

SEQ ID NO: 83384 - protein, 204 aa, Zea mays
  Coding DNA Sequence Number=SeqID_41605
  Subcellular localization annotation: CTP_CleavageSite=32; ConfidenceScore=5.59e-01
MVIGSRMDGSGSKSPRITSNGCGASPNSPSVYGGAARGSWRTIAGDNRSDATRPGTSPTIVQNVTRIKCRPQPSARNSESRLRLNPHREHTGEFPAQRRSSPTRFLDSTVTGLSMATEAYQWFARRQRGARWLASREGWTTLFNGEQGGMAPGQMSRRSESLAAPIAPRILGIPLRAHGFHGEEAQDLAHGLWREAPTRQRKRG

SEQ ID NO: 83385 - protein, 1053 aa, Zea mays
  Coding DNA Sequence Number=SeqID_41606
  Homolog annotation: Hit_ID=Q7XDI4; Match level="QueryCoverage=93%, HitCoverage=97%, E-value=0.0, Identity=68%"; Hit description =Expressed protein
  Pfam annotation: Domain name=DUF810; Domain location=40-1001; Score =1555.0; E_value=0; Accession=PF05664.2; Description=Protein of unknown function (DUF810)
MGGHYRSRSASASSTATRSDITELDFAAAGLDCPFGRVDALGPVELRETAYEIFFMSCRSSGPAAPSRGGAAEGEVSSPVAGAGARCGTGGGVMGSRVKKALGLRPRRLSPMMTRTLSQTSGPASPGRVRRPMTSAEIMRQQMRLTDQTDARLRRTLMRTVVGQVGGAPMTVLIYIFSLRNDRVWFAQVGRRAETIVLPLELLRQLKPAEFGDTEEYHQWQFRQIKLLEAGLILHPSLPLDRLHSAVLRFREVMRATEIRAIDTSKNSDVMRALSNAVHALSWRSGTTGAAVEACHWADGYPLNVLLYCSLLQAIFDLRESTVVLDEVDELLELIKKTWPTLGINRMLHSVCLSWVFFQQYVITGQVEPDLAAAALAILVDVAADTKHGSRDPMYVKVLLSALGGMQEWSEKRLLDYHDSFEKDIGGAATEGMEILLSLALAAGKIVADREGASDGNFAVDRVDYYVRCSMKSAFTNILENGLGEVDSVIIDRDSDPGSVLIQLARDTEHLALFERRNFSPVLRRWHPAPVAVAAVTLHGCFGVVLRQYLAKVTILTEELVRVLHSASRLEKALAQMTAEDAADCADGRAKGIVGDMEPFEVESVVMGLLKAWMDDKLGLGRDCLLRARDTESWIPKSKEEPFAGSAMELMKLARLTIDEFSEIPASAKDEVVQDLVDGLESIFQEYIFFVASCGSKQNYLPPLPPLTRCNQDSGFFRLWKKAALPTCQAPPDATPRGGGGSHHVPRPSISRGTQRLYVRLNTLHYVLTHLEALDSSLSSSTSHLDRARAAAQSSISAVAEVAAHRLIFLDSRHSLYQGLYARSVADARIRPALRLLKQNLSFLVSVLADRAQPVAVREVMRASFEAFLMVLLAGGNERSFVRADHATVEEDFRSLRRAFSTCGEGLVPEDVVAREAETAEAVVELMARSTDYLIDAFSVATCDSISEDGRAGAGGCTPLPPTTRRWDPADPNTILRVLCHRDDEAANQFLKRTFQLARRRVDRCAQIAVAPLVHRTLSGDTPDSPVNYSGAAPGKPKGEEFELKHPGAPDTV

SEQ ID NO: 83386 - protein, 876 aa, Zea mays
  Coding DNA Sequence Number=SeqID_41607
  Homolog annotation: Hit_ID=Q7XDI4; Match level="QueryCoverage=97%, HitCoverage=83%, E-value=0.0, Identity=69%"; Hit description =Expressed protein
  Pfam annotation: Domain name=DUF810; Domain location=40-876; Score =1118.9; E_value=0; Accession=PF05664.2; Description=Protein of unknown function (DUF810)
MGGHYRSRSASASSTATRSDITELDFAAAGLDCPFGRVDALGPVELRETAYEIFFMSCRSSGPAAPSRGGAAEGEVSSPVAGAGARCGTGGGVMGSRVKKALGLRPRRLSPMMTRTLSQTSGPASPGRVRRPMTSAEIMRQQMRLTDQTDARLRRTLMRTVVGQVGGAPMTVLIYIFSLRNDRVWFAQVGRRAETIVLPLELLRQLKPAEFGDTEEYHQWQFRQIKLLEAGLILHPSLPLDRLHSAVLRFREVMRATEIRAIDTSKNSDVMRALSNAVHALSWRSGTTGAAVEACHWADGYPLNVLLYCSLLQAIFDLRESTVVLDEVDELLELIKKTWPTLGINRMLHSVCLSWVFFQQYVITGQVEPDLAAAALAILVDVAADTKHGSRDPMYVKVLLSALGGMQEWSEKRLLDYHDSFEKDIGGAATEGMEILLSLALAAGKIVADREGASDGNFAVDRVDYYVRCSMKSAFTNILENGLGEVDSVIIDRDSDPGSVLIQLARDTEHLALFERRNFSPVLRRWHPAPVAVAAVTLHGCFGVVLRQYLAKVTILTEELVRVLHSASRLEKALAQMTAEDAADCADGRAKGIVGDMEPFEVESVVMGLLKAWMDDKLGLGRDCLLRARDTESWIPKSKEEPFAGSAMELMKLARLTIDEFSEIPASAKDEVVQDLVDGLESIFQEYIFFVASCGSKQNYLPPLPPLTRCNQDSGFFRLWKKAALPTCQAPPDATPRGGGGSHHVPRPSISRGTQRLYVRLNTLHYVLTHLEALDSSLSSSTSHLDRARAAAQSSISAVAEVAAHRLIFLDSRHSLYQGLYARSVADARIRPALRLLKQNLSFLVSVLADRAQPVAVREVMRASFEAFLMGAPGGL

SEQ ID NO: 83387 - protein, 291 aa, Zea mays
  Coding DNA Sequence Number=SeqID_41608
  Subcellular localization annotation: CTP_CleavageSite=28; ConfidenceScore=5.49e-01
MAPRPVAARASPPGAATPACPPRPSPSPAGAARSHGVARRDNGLVEESKELAGEDPEQQLVAMRMVVLVLTMVMMARLRHTARKSVIPFLPSRLAERPLRRPVTGQSSHLERLHHRLHEDRGVYPDRWEATCLVRRSENSLRGAEVYSEHYSISERDSAEAAMQDAARRALSHYCSVLGGVVDGLNLKYYPRRPSGSTGGVIVSPVGEDNPRLNSTINLAAVLNTELDHALDELSRARAEIAPLWAERAEHRHLEDGSPAPVGTQHPYRSPRRGHQAYDNPNCRTKINLEP

SEQ ID NO: 83388 - protein, 108 aa, Zea mays
  Coding DNA Sequence Number=SeqID_41609
MANAIPYVISHAYSVYLLSCMVYCLFPNSNGWMYVCARIENGLVEESEELAGEAPEQQLVAMRMMGFGIDSGNGKVGIPSVWKRVVCIATTAQEKMKPWKETSRILRL

SEQ ID NO: 83389 - protein, 345 aa, Zea mays
  Coding DNA Sequence Number=SeqID_41610
  Gene Ontology: Mol. function=hydrolase activity, acting on ester bonds; Cellular component=cytosol; Biological process=one-carbon compound metabolic process
  Homolog annotation: Hit_ID=Q00XC3; Match level="QueryCoverage=59%, HitCoverage=90%, E-value=1e-12, Identity=29%"; Hit description=[E] KOG2551 Phospholipase/carboxyhydrolase
  Pfam annotation: Domain name=FSH1; Domain location=123-333; Score= -7.3; E_value=6.5e-07; Accession=PF03959.4; Description=Serine hydrolase (FSH1)
MTVMHRARYIQPFQCRLRCVLQIQFLAAHVAKPTKSANGQVCQICGDSIGRCQLRQLVSSKAPSALGPRSTLPRRLATFAAASSCSCSCPLRDGNRRAHGVRASESTDTDAPAFGPPRPRRPPRFLCLHGFRTSGEIMRRQVVGRWAPEVTARLDLVFADGPFPAEGASPVAGAFDPPYYEWCQFVGEDFLSCRNLDRCFSYLEELMAREGPFDGLLGFSQGAGLSAVLAGLQEQGLALTGVAQVKCVIVIAGAKIRAPAAVARAFDTKITCPSLHFIGEEDFVKVHSEELVRAFADPLVIRHPRGHTVPKLDEKGLQTMLTYLDKIEREIWEHSSTDAEIVGSN

SEQ ID NO: 83390 - protein, 50 aa, Zea mays
  Coding DNA Sequence Number=SeqID_41611
  Homolog annotation: Hit_ID=Q9LLI9; Match level="QueryCoverage=97%, HitCoverage=4%, E-value=3e-10, Identity=88%"; Hit description =Cellulose synthase-1
MGMVAGSHNRNEFVMIRHDSDAPGPRCFRCAVLSPQRVRIGRSARFVVTL

SEQ ID NO: 83391 - protein, 200 aa, Zea mays
  Coding DNA Sequence Number=SeqID_41612
MVVRVEVPPKPRSSMSSMAEVSPSPWVERGGGCSAEAWAESEPWGRAKRSSSSSGAEPESEPWVGRSGVRRLPGPSPSPSPRSGGAEFAVFRGLARVRALVGVSQAALSFCQTGQWSGGVTAVTSALPGARVRIEVSGHLCVKCPCNLVSWCGDLVKVASERSQGLGRAGDVSAIKRGPRARQKSLEVGCLWPRLGSGEA

SEQ ID NO: 83392 - protein, 172 aa, Zea mays
  Coding DNA Sequence Number=SeqID_41613
MTKNLYYIDTFDLPEGADVKVVGVSRQGVPKPTTGEIWAPCWRDVVAVGGAAEPDGGTSIGEVESLLTSSGFLGVAQAALSFCQTGQWSGGVTAVTSALPGARVRIEVSGHLCVKCPCNLVSWCGDLVKVASERSQGLGRAGDVSAIKRGPRARRKSLKVGCLWPRLGSGEA

SEQ ID NO: 83393 - protein, 108 aa, Zea mays
  Coding DNA Sequence Number=SeqID_41614
MASIESHPWLRMKGNGVLHRKIVVACTVRLKGTRQRGLGELYIGNGLFAECIMSGTRQSLYGVPPSARQRKVTVMTFVECLLAWHSAKKAPMGLHVSLFVESHKLALG

SEQ ID NO: 83394 - protein, 269 aa, Zea mays
  Coding DNA Sequence Number=SeqID_41615
  Subcellular localization annotation: CTP_CleavageSite=29; ConfidenceScore=5.06e-01
MASIESHPWLRMKGNGVLHRKIVVACTVRLKAVAAIRLPSPPPSSLSRQMQGVTVHSPSTSSRGRIRPRHGPEASRSSSLLFEATAFRRFATRRRRFGRASVPVPVGAVDDEVEVVSKVLRSRPKTKRAQIRLRPAQLRMASSKEDTIKCLVKVLVDCVEDATKSLRGLVDHALDHMHDEEILARTLFAMKEKLDLLHQDALEAKVQAFPEIAKYEGDDISVEPTSPSTPPTVTEPSVDEEEFYCPDVSDEWYFSDSDRSTRNSYWNIY

SEQ ID NO: 83395 - protein, 130 aa, Zea mays
  Coding DNA Sequence Number=SeqID_41616
MASSKEDTIKCLVKVLVDCVEDATKSLRGLVDHALDHMHDEEILARTLFAMKEKLDLLHQDALEAKVQAFPEIAKYEGDDISVEPTSPSTPPTVTEPSVDEEEFYCPDVSDEWYFSDSDRSTRNSYWNIY

SEQ ID NO: 83396 - protein, 220 aa, Zea mays
  Coding DNA Sequence Number=SeqID_41617
  Subcellular localization annotation: CTP_CleavageSite=56; ConfidenceScore=5.62e-01
MQGVTVHSPSTSSRGRIRPRHGPEASRSSSLLFEATAFRRFATRRRRFGRASVPVPVGAVDDEVEVVSKVLRSRPKTKRAQIRLRPAQLRMASSKEDTIKCLVKVLVDCVEDATKSLRGLVDHALDHMHDEEILARTLFAMKEKLDLLHQDALEAKVQAFPEIAKYEGDDISVEPTSPSTPPTVTEPSVDEEEFYCPDVSDEWYFSDSDRSTRNSYWNIY

SEQ ID NO: 83397 - protein, 129 aa, Zea mays
  Coding DNA Sequence Number=SeqID_41618
  Subcellular localization annotation: CTP_CleavageSite=53; ConfidenceScore=5.01e-01
MTPVALSPLRQQGDVSRILAALPAMLLQDSGAPPTAMPSHVQGPSSPPTATLACAKGSQQTNTKSRERVQNKGAKYTEGSPGLAHHRTVSAPDCPMCQRSNGYFAPMVVCEGIKCATVRACARRSQSRH

SEQ ID NO: 83398 - protein, 183 aa, Zea mays
  Coding DNA Sequence Number=SeqID_41619
MTSVALNPLRKQGNVSRIRAAPSAMLLQGLRHFSDGHRSNGSFALMVVCEGIKCATVHAYARRSQSRRQKAHRTVYKTCPVHHRTVRWPHKSELQRSNPNGWVTWLAHRTVSGGAPDCPVRHATAASTNGYFGGWSYKYPQPPTIHCIQVFRLQTPYKSYSIQYKTQPKRSNPLPSPESLQTN

SEQ ID NO: 83399 - protein, 251 aa, Zea mays
  Coding DNA Sequence Number=SeqID_41620
MEDLIPKFEACGLYHFMGQRTNFSEMVVKQFLATAEIDIDEQSITWMTGFKRYSATFVEFATANSLDYDTISAGIDLYTEDNFEEFVQFYEPARLGIPWRVTILLKSGDKSKIRDKFWNIIHHVMNGENLAYAPCIMALIKAKTRFEGLCEIVHTRFRPFKNEIGFLTRPLTPFLDDEEEASDDAGEAPEADAEEMPPSPPRPQPQQYWQPGLGYFDPYFQNMQQGVQTHMDGRFQGMMTHMHQGMDNESS

SEQ ID NO: 83400 - protein, 133 aa, Zea mays
  Coding DNA Sequence Number=SeqID_41621
MKELLLKLMQLSRCLLLHLLLSLSSSSSLNMQQGLQTHMDGRFQGMMTHMDQHMDAMQSRFDDNLDVLNSELSEFRSHIQETIHDPLMTRMNNMQQSFQDNMGVLSNQFDNLSTNESIQDNRKSQQQLQTDFG

SEQ ID NO: 83401 - protein, 1141 aa, Zea mays
  Coding DNA Sequence Number=SeqID_41622
  Gene Ontology: Mol. function=protein serine/threonine kinase activity; Cellular component=plasma membrane; Biological process =plasma membrane organization and biogenesis
  Homolog annotation: Hit_ID=Q9SFB6; Match level="QueryCoverage=86%, HitCoverage=72%, E-value=0.0, Identity=46%"; Hit description =Putative MAP3K epsilon protein kinase
  Pfam annotation: Domain name=Arm; Domain location=361-401; Score=8.5; E_value=1.1; Accession=PF00514.13; Description=Armadillobeta-catenin -like repeat
  Pfam annotation: Domain name=Arm; Domain location=468-504; Score=1.3; E_value=8.3; Accession=PF00514.13; Description=Armadillobeta-catenin -like repeat
  Pfam annotation: Domain name=Arm; Domain location=882-926; Score=6.8; E_value=1.7; Accession=PF00514.13; Description=Armadillobeta-catenin -like repeat
  Pfam annotation: Domain name=Arm; Domain location=928-967; Score=3.2; E_value=4.8; Accession=PF00514.13; Description=Armadillobeta-catenin -like repeat
  Pfam module annotation: Pfam domain module=Arm::Arm::Arm::Arm; Domain location=361-401::468-504::882-926::928-967
METIIRRFCRILPRGRRQTQEQPNKRLVHTAGTLSSCSGNDVVWRQQQGSCSRQQEAGTGVAWSSMNIDGDDESSRGDNNSGFCDTPGDTRATIASNVDQVNGRNGPNMDSAAQSKSEELHDGNLELTEGISSNNVALVKDNVVLNKDPTLVLHEKLPVESSFGDADLNGKVMAHELLQGGLPSKIELENKESSTVEDGDVFSFQAGRQNIDFQMVVEPSVVEGPKQLSRFSDKPEDASLEDLFPPIDKRGDNGAEPSTSTTVQELQYNGVHNGFVKGLNARVEKQKENDSESMNGGKLIEFAMQLENIDASGFGEHIPGESLFPLQSVEYSKIVAQLKPGESEDVILLACQKLLSIFSHRPEQKQIYMAQNGFLPLMELLEIPKNRILCSVLQLINNIVKDSTGFLENACLVGLIPVVMNFAEPNRPKDVRVQASLFLQQLCQARDMVHLAIDGIWQVFKLQHSTPRNDFCRIAAKNGMLPRLVNTLYSLNEATRFASVSGSGASVTQNGSTPRRRSGQLDPSVLESCKARLDHHHSSGSLQSLQADADKHHILMDSSSSPRFSDKTSSNLERNENDLVIRPQRLSVSAGRTSTDRSPKHIELVSNGHNNSQNDQVRPLLSLLEKEPPSRHESELIVHVSLKYMCTSLQLFDFSVKSHDHHTDEIVGRDAIQEGKEPMTMDVDVVYGALGAYAGDGMEGDDCSIRLIIKGNLGTLVLGCLVENVVGGLNIEQTLVLVPQMYAQACPQQQCAVEQAMLTVLAGEAGWPDAPEVSRHGRENGHLDSSIKASNRVHSMKYAPSASASNEGASTSGAASQTASDVAREYLEKVADLLLEFAQADTVVKSLMASQSLLTRVFQMFNKIEPPILLKILRCINHLSGDPNCLETLQRTDAIKHLIPILELRDGPLVYQIHSEVLNALFNLCKINKRRQEQAAENGIIPHLMKFVMSDSPLRQYALPLLCDMAHASRNSREQLRVHGGLDVYLNLLEDDAWACTALDSIAVCLAHDNDHRKVEQALLKKEAIQKLVKFFQDCPEQYFGHILDAFLKIITKSSRLNTAMATNGLTTLLIARLDHREAIARLTLLKLIKVVYEHHPRPKQLIVENDLPQKLQNLIEERRDGQRGGQQDEMDVLSFSVVYI

SEQ ID NO: 83402 - protein, 110 aa, Zea mays
  Coding DNA Sequence Number=SeqID_41623
MWKDRVEHAKDIWALYPGQTAHLTVRRGEAMSHLMALLEATKITLDNREELVVDLSTEMVEKDLQEIQDMEANEDVDIEGGGEPEPASSLDTAGSGRPPSPESSIASFAH

SEQ ID NO: 83403 - protein, 243 aa, Zea mays
  Coding DNA Sequence Number=SeqID_41624
MASHGSSEGGNAQSHTDGLAREGFPRILWEVLQGACYATPPQVRMTLEPHPLQPGWRSLDSESFGYRAKDLIEAIALHGLTTFCGFNPLELSTHPIGLFPTEKEDDPMWKDRVEHAKDIWALYPGQTAHLTVRRGEAMSHLMALLEATKITLDNREELVELEELVGTRENTIEVLEDQLINMQQQLAEANQHLDMHHQEIQDMKANEDVDIEGGEELEPASSLDTAGSRRPPSPESSVASFAH

SEQ ID NO: 83404 - protein, 60 aa, Zea mays
  Coding DNA Sequence Number=SeqID_41625
MSAWTEVESAQKEASSAWEHVAPLAEEVQRRRLELGQDPAIEAVEKRERRSGKRLFRGKF

SEQ ID NO: 83405 - protein, 389 aa, Zea mays
  Coding DNA Sequence Number=SeqID_41626
MPASPAKGVACPAEELMRRDGRFAGRPLHVREPFEERNTGVSSLLRGRGLSCRFRRGREPAGDWTTASTRQLLQLLLGCLESRHWFRSREDATLAGFGFFYFRSARMTCGTQPPRRRVGALELVGGDFARDAWNASGESRLYKGVDPPGSRHASALSSCIAPFHLPSPQMGSTRVAFVLPLLEERIITSLVVGRSKPGCSLCPAFSFKDVHHPCWGGGRTELGPASAWAGDPLLPPAFGGEGHPPALRRRRPPAMRGNANCCCLGRVQLSVLPSGDGRAVCGPAASRSSLRRRLHWEVAQHVVRREGGTRVLGRSRSRSYGENGSEDLPVRFGAAAARWCGVGGQVATVVGAEVVVATGEAASAEAVASANETVSANCAPDLRLFGFNG

SEQ ID NO: 83406 - protein, 278 aa, Zea mays
  Coding DNA Sequence Number=SeqID_41627
  Homolog annotation: Hit_ID=Q6QP51; Match level="QueryCoverage=37%, HitCoverage=37%, E-value=1e-33, Identity=76%"; Hit description =Putative growth-regulating factor 1
MNILEAEGGAEAAARLASPHHKAGFPPSDAGAGSHMSCKLTRNRRSQTAAREADAPRIARPVALTPRQGKRHLWQAKRASFHLRHDDRVKKGTGKGDISKRILLSKGNGPPSPPTYQGLAPRKGSTAAPEHSGSEPITDQGFKGWPLGRVRQPPQSTRAPCPLLIRGSKAGPSEGFNSRPRARRVRDDSGYVRYMAEARATLLRYPRTFSRPAGAICNGIPPEGGIEPSDPIEWVRVRQITCRLRRESNLGQIALPTDRVAGTFNAKIAWHLILTRAP

SEQ ID NO: 83407 - protein, 265 aa, Zea mays
  Coding DNA Sequence Number=SeqID_41628
  Subcellular localization annotation: CTP_CleavageSite=66; ConfidenceScore=5.58e-01
MAVHPFTRWSGQKWRTARNRWAVVRTARGAIVRLQGFSSGSPAASPRRWSPKTVTTSSWVGRSKPGCDLGPALSFKDLHHPCWGGEQGEPGLYLPHGSAGHLFSHLFSQLLTALWRRRPPAMPGKANCCCPARMQHSVLCPRFCGEDGSEDLPVRFGAARARWCGVGGQTDAAVGADVVAAGESFPTVEVVSAAYGPTPGSLALISGSCPLSGDADESLPGGRVRPGTMAAAAEVTGESPGACRPAGPPVWRLFIPSGTEPEFRL

SEQ ID NO: 83408 - protein, 327 aa, Zea mays
  Coding DNA Sequence Number=SeqID_41629
  Subcellular localization annotation: CTP_CleavageSite=66; ConfidenceScore=5.58e-01
MAVHPFTRWSGQKWRTARNRWAVVRTARGAIVRLQGFSSGSPAASPRRWSPKTVTTSSWVGRSKPGCDLGPALSFKDLHHPCWGGEQGEPGLYLPHGSAGHLFSHLFSQLLTALWRRRPPAMPGKANCCCPARMQHSVLCPRFCGEDGSEDLPVRFGAARARWCGVGGQTDAAVGADVVAAGESFPTVEVVSAAYGPTPGSLALISGSCPLSGDADESLPVAASVLGPWLLLQRSLASHPELVALQALRNPRPLFDEPKPEVAVSVWTEAELARKEDFVGRSLAGPSTGGTDAGVELPRPRAGLMSSGDSWLRLRGGRPSRLLGLDS

SEQ ID NO: 83409 - protein, 109 aa, Zea mays
  Coding DNA Sequence Number=SeqID_41630
MSTRRTHKVPCVQVASSVDTILSESVVRAAIMQFYPNRIRCTILGKTHRKRFTNKWLHFTVGGRRPFVNQLHRGRGPKKVQFTIKCFSRYMRRSGFHPDRIRRDIRVQL

SEQ ID NO: 83410 - protein, 218 aa, Zea mays
  Coding DNA Sequence Number=SeqID_41631
MCVHPQEALGFIVVPSVLVITPLLDVTNKKSRVTLMDWVRVTIYKEILHHFTVGRRRPFVNQLHRGRGPEKVQFTIKCFSRYMRRSGFHPDRIRRDVRLFMAELSSSTRARALASLAQIPDRIVATTATFFMSWGKLMAGYANGSSRFARGLSEKGFASIPAMTESLKSLGPPTVVLVQQTSDNPVDVPESLDKFGIFFLTFPGTFHPSCRHYRTSEI

SEQ ID NO: 83411 - protein, 81 aa, Zea mays
  Coding DNA Sequence Number=SeqID_41632
MAYVSARDEPGQMHLLEITLPMGYPESPPSISAASTKADGARFCRFRIPPDWDEFGIGSTKGSTDLASAPQIFGTHALFSQ

SEQ ID NO: 83412 - protein, 369 aa, Zea mays
  Coding DNA Sequence Number=SeqID_41633
  Homolog annotation: Hit_ID=Q6J9W0; Match level="QueryCoverage=17%, HitCoverage=17%, E-value=3e-30, Identity=95%"; Hit description =Putative RNA-binding protein
  Pfam annotation: Domain name=PPR; Domain location=255-289; Score =12.5; E_value=0.25; Accession=PF01535.11; Description=PPR repeat
  Pfam annotation: Domain name=PPR; Domain location=291-325; Score =28.9; E_value=1.7e-05; Accession=PF01535.11; Description=PPR repeat
  Pfam module annotation: Pfam domain module=PPR::PPR; Domain location =255-289::291-325
MAKVTDKKKTKKALGTIYEEGSPEPANGDDDGALALPETGLGLSLNTDGVLKAWCGRGSAFADGNGPDLPLSPAHVVGLRLFNIDMIREHPPPCQATHTITRSTRDGICIAKASLNSARCVAQASHTALLFFKEQPLAASSRGRPVSDDSCKNPWEKASGPGNVTRTSLTPQGLQAQAGSSTCHHSMADVQGARSWTLELTDVWSGIKEEMFLTVFTLIKLMNLSTVSGLNRGLAASQEDLDHTDAAAGCPVDTRTVNVLIRGYGQSLHLNDALRLFHQMRPLYWCEPDAFTYSYLVHGLSAQGRTRNAWELFDEMRGSGLLGSHTRYLQILSDPTKSYLKRGAGCGAGPVRYRGAVQDDLIPIALSFV

SEQ ID NO: 83413 - protein, 154 aa, Zea mays
  Coding DNA Sequence Number=SeqID_41634
  Homolog annotation: Hit_ID=Q6J9W0; Match level="QueryCoverage=90%, HitCoverage=37%, E-value=6e-78, Identity=100%"; Hit description =Putative RNA-binding protein
MAKVTDKKKTNKKSLGTIYEEGSPEPANGDDDGALALSETGLGLSLNTDGVLKAWCGRGSAFADGNGPDLPLSPTHVVGRVLPAPWPLPTLVVVTEGAATSQRMSVAIPLEQSITPVLQDFMNLNIFYLPVYYYGEFYDLRYSLVIDSHVHETT

SEQ ID NO: 83414 - protein, 435 aa, Zea mays
  Coding DNA Sequence Number=SeqID_41635
  Homolog annotation: Hit_ID=Q6J9W0; Match level="QueryCoverage=57%, HitCoverage=60%, E-value=9e-78, Identity=64%"; Hit description =Putative RNA-binding protein
  Subcellular localization annotation: CTP_CleavageSite=77; ConfidenceScore=5.48e-01
MASSCIPAGGIRLPDLEMVKAAPPAHSAASSTLSEASSASAVSSSATSSSVASLSLKRPRTPRKRSSQTYNEAAALLASMYPSVFPVARGGAAPRRLLGLASALADDSSCSDLLPPFPVPGGHAAFLLRDLTPRIPAAESCPSPAAVSSVFSEFRDPAPSPATPDDAAAAPDERRDLGFDDDDGFDADSILCGVDQSAAEGIDGIMGKLSMENNGASVSGSSVDSNMPGSKMHPYLRNLMVLGLSFRQDQNIIINQALKRHSVDPEWWMCPAIPVKDITPAPPPSVAMAKVTDKKKTKKKSLGTIYEEGSPEPANGDDDGALALPETGLGLSLNTDGVLKAWCGRGSAFADGNGPDLPLSPAHVVVKHEDNDLFPKNGTGAVIREGNILKMQRKQKPCTPLPSNKQSRYYRPRVKGRFVSKACFLQRQQALEKES

SEQ ID NO: 83415 - protein, 76 aa, Zea mays
  Coding DNA Sequence Number=SeqID_41636
MGKTEGYMDASSAAASLYVWLENASGGRGSSPAACGCGGDWIFVGDFGAALQIKREISVGVSFDQGPVLAFGPWGV

SEQ ID NO: 83416 - protein, 197 aa, Zea mays
  Coding DNA Sequence Number=SeqID_41637
MELIRLHTPLPRKRGRVPLRGLYKVPLASDYPLQFIGSSNAGIPCRTAIAAKSSRGPPYTDHSPTALAPFGSFIGLYAPRAGYHKIYGTDASREGASGIGWETSTDSAEAPPQITRSVSVSIGEGDEAAKVAPPAAEYRRQKEQVTKPRWAPDQVAGRQTSGVSSAVTQFAGNQCGIGEGRPPDWAHLSAPESQKQE

SEQ ID NO: 83417 - protein, 170 aa, Zea mays
  Coding DNA Sequence Number=SeqID_41638
MDGQKERRSRVLDIWPRAPGIRDNRLWFGRGTHAKTADGSGARVLHDELLHPWRTRYLSPSPILPRRRLLCLLGSLAQHDVFGRAEITRSVSVSIGEGDEAAKVAPPAAEYRRQKEQVTKPRWAPDQVAGRQTSGVSSAVTQFAGNQCGIGEGRPPDWAHLSAPESEKQE

SEQ ID NO: 83418 - protein, 156 aa, Zea mays
  Coding DNA Sequence Number=SeqID_41639
  Gene Ontology: Mol. function=serine-type endopeptidase activity; Cellular component=chloroplast thylakoid membrane; Biological process=proteolysis
  Homolog annotation: Hit_ID=Q6Z806; Match level="QueryCoverage=51%, HitCoverage=18%, E-value=8e-33, Identity=75%"; Hit description =Putative DegP2 protease
SPIHPPLGALTNAHSVEHYTQVKLKKRGSDTKYLATVLAIDTECDIVLQDVVTVVGYPIGGDTISVTSGVVSRIEILSYVHGSTELLGLQAAIEYIHSLSRAQPARSLNGVGLCPASRSLSTHAATTSSTPQLKAHHVKHPGRHYVKQNRRREELM

SEQ ID NO: 83419 - protein, 367 aa, Zea mays
  Coding DNA Sequence Number=SeqID_41640
  Gene Ontology: Mol. function=serine-type endopeptidase activity; Cellular component=chloroplast thylakoid membrane; Biological process=proteolysis
  Homolog annotation: Hit_ID=Q6Z806; Match level="QueryCoverage=80%, HitCoverage=53%, E-value=1e-86, Identity=58%"; Hit description =Putative DegP2 protease
  Pfam annotation: Domain name=Trypsin; Domain location=106-291; Score =36.3; E_value=4.1e-09; Accession=PF00089.16; Description=Trypsin
  Subcellular localization annotation: CTP_CleavageSite=73; ConfidenceScore=5.58e-01
MDDPSSASNKHKHKRGRKPKASPPSPDHSSPSPSVAPAPAGRRGRKPRRHEALADVDATRPPSPPRRGEPKPVANGGDVVAVAESGPASWDEVVRVVPCMDAVVKVFCVHTEPNISLPWQRKRQYCSSSSGFIISGHHVLTNAHSVEYLATVLAIGTECDIEKYTKIIFYGIYETSEAIASFELWHGVSPIEFGTLPVLQDAVTVVGYPIGGDTISVTSGVVSRIEMLLYVHGSIELLGLQIDAAINSGNSGGPAFNDRGKCVGIAFQSLKHEDAENIGYVIPTPVITHFIEDYKNLENTQAAIEYIHSLSRAQPAHSLNGVGLCPASRSLSTHAATMSSTPQLKAHHVKHPGCHYVKQNRRREELM

SEQ ID NO: 83420 - protein, 248 aa, Zea mays
  Coding DNA Sequence Number=SeqID_41641
  Subcellular localization annotation: CTP_CleavageSite=18; ConfidenceScore=5.19e-01
MARTLSPCKPARGDRNTRAAGYTGQRVSPTADSSTSVESVLRGDSSGAEPQPAQAKPRRRAPGGSVAQEPDVDRQRIRGGFELPSTTHVNGGTETKSTTGEESRRVPRHLCTLIPPQGTKNPGGHLGSTQEGAMPPHAKLQASPLEFERPRRTTPTPTHVPCSRSPATSHESPRSESFEVWTSPYRNDEARRGQLRKGAPQSMDFMGKESAGGSGSRPGFSRRLVLFITGRQIRSWRFGAHRAVTWRG

SEQ ID NO: 83421 - protein, 369 aa, Zea mays
  Coding DNA Sequence Number=SeqID_41642
MTTAFVSRPPPCTRGNEAHGVLTRSSIVETAGSIREEPEAEHHLCVDKAHDSLRSYLTEVLGPRVCYPLSRGTVTPGFKEQSQFIGSSNAGFLADRHRSKINQGPPYTDHSPTALAPFGPHLLKCAGANSQDCQDTANSHTWMAGQRVSPTADSSTSVESVLRGDSSGAEPQPAQAKPRRRAPGGSVAQEPDVDRQRIRGGFELPSTTHVNGGTETKSTTGEESRRVPRHLCTLIPPQGTKNPGGHLGSTQEGAMPPHAKLQASPLEFERPRRTTPTPTHVPCSRSPATSHESPRSESFEVWTSPYRNDEARRGQLRKGAPQSMDFMGKESAGGSGSRPGFSRRLVLFITGKQIRSWRFGAHRAVTWRG

SEQ ID NO: 83422 - protein, 120 aa, Zea mays
  Coding DNA Sequence Number=SeqID_41643
MPSALCFGGIHCMPCTDVTVLKNILIIPGRPPQWVWARDGLRSELEGSDESEYSSDEEDSDGGGEDEDGDDDDDDEGGGGGDGDDSDRGGSSGSKDGDGGGSRGGNGGGGSSRGSNRASG

SEQ ID NO: 83423 - protein, 141 aa, Zea mays
  Coding DNA Sequence Number=SeqID_41644
MGVAPDLQMDFRGNWHDAIRIMLWRYSLRALHRCDRFEKYTDNSWASPPMGVGKGRLVIAVGGERLPSPSINNAVVSLAFSHLSLFSVAFLSSLPSASTMGKNNKRKREPTPPSEEFGDSEYSEEEFSSESEGSLAPIPLR

SEQ ID NO: 83424 - protein, 593 aa, Zea mays
  Coding DNA Sequence Number=SeqID_41645
  Gene Ontology: Mol. function=protein binding; Cellular component =integral to membrane; Biological process=multicellular organismal development
  Homolog annotation: Hit_ID=Q9FNN8; Match level="QueryCoverage=89%, HitCoverage=92%, E-value=0.0, Identity=73%"; Hit description=Cleft lip and palate associated transmembrane protein-like
  Pfam annotation: Domain name=CLPTM1; Domain location=27-561; Score =995.7; E_value=1.7e-296; Accession=PF05602.3; Description=Cleft lip and palate transmembrane protein 1 (CLPTM1)
  Subcellular localization annotation: CTP_CleavageSite=35; ConfidenceScore=5.27e-01
MSQPAATVAAAAQPQGRGPAGRQGGLGQSIAGIVRMAVFWYFASKFFGPKRPPADPGMLMSNLFQKGEPMDMWMYLSENEKFNDFANEDALIWHEANIPYAVWGPTSTRTRSLTYYPSEALKHNGSLYAHVYFAPFGVILWTLQIQNMSRNLRLGGPIVSVVAFLPKSKAGKKKSLLGDSEEPEEKAPRNKENKESEDKDEGPTEYISYWKPNVTINLVEDFTRLTDLNVDPVTGDYYPTVFFNEFWLLKDKLIALNETVEELPLNLEVGPISMTKWQLFLQIEQSFQVHRSYGSMLEGEADELKRVFLEGNPYLLGLTMVVSLLHSLFDFLAFKNDIQFWNKNKSMEGLSAKSVVLNFVCQLVVFLYLLDNDTSWMILASSGVGVCIEFWKIGKAMHIEVDRSGKIPMLRFRDRESYAQNKTKEYDAIAMKYLTYVLFLLVVGFSIYSLKYEKHKSWYSWILSSMTSCVYMFGFIMMCPQLFINYKLKSVAHMPWRQMTYKFLNTIIDDLFAFVIKMPMLHRLSVFRDDVIFLIYLYQRWKYPVDKKRVNEFGFGGEDEPAAQEAVEGSDSAAAPQLTEAGSETSTEDKKTK

SEQ ID NO: 83425 - protein, 332 aa, Zea mays
  Coding DNA Sequence Number=SeqID_41646
  Gene Ontology: Mol. function=protein binding; Cellular component =integral to membrane; Biological process=multicellular organismal development
  Homolog annotation: Hit_ID=Q9FNN8; Match level="QueryCoverage=83%, HitCoverage=47%, E-value=1e-148, Identity=89%"; Hit description =Cleft lip and palate associated transmembrane protein-like
  Pfam annotation: Domain name=CLPTM1; Domain location=1-279; Score =365.2; E_value=1.1e-106; Accession=PF05602.3; Description=Cleft lip and palate transmembrane protein 1 (CLPTM1)
IEQSFQVHRSYGSMLEGEADELKRVFLEGNPYLLGLTMVVSLLHSLFDFLAFKNDIQFWNKNKSMEGLSAKSVVLNFVCQLVVFLYLLDNDTSWMILASSGVGVCIEFWKIGKAMHIEVDRSGKIPMLRFRDRESYAQNKTKEYDAIAMKYLTYVLFLLVVGFSIYSLKYEKHKSWYSWILSSMTSCVYMFGFIMMCPQLFINYKLKSVAHMPWRQMTYKFLNTIIDDLFAFVIKMPMLHRLSVFRDDVIFLIYLYQRWKYPVDKKRVNEFGFGGEDEPAAQEAVEGSDSAAAPQLTEAGSQVEDESTYCHHQCTMVEDWMGCERVDEFAVR

SEQ ID NO: 83426 - protein, 347 aa, Zea mays
  Coding DNA Sequence Number=SeqID_41647
  Gene Ontology: Mol. function=serine esterase activity
  Homolog annotation: Hit_ID=Q010S2; Match level="QueryCoverage=43%, HitCoverage=52%, E-value=1e-22, Identity=32%"; Hit description=[R] KOG1516 Carboxylesterase and related proteins
  Pfam annotation: Domain name=Abhydrolase_3; Domain location=163-342; Score=-88.9; E_value=0.062; Accession=PF07859.3; Description =alphabeta hydrolase fold
  Pfam annotation: Domain name=KOW; Domain location=304-340; Score =34.1; E_value=4.9e-07; Accession=PF00467.19; Description=KOW motif
  Pfam module annotation: Pfam domain module=Abhydrolase_3::KOW; Domain location=163-342::304-340
  Subcellular localization annotation: CTP_CleavageSite=49; ConfidenceScore=5.41e-01
MATRRLRPQPTVMVLMSPFRPSPSSFPVGFAGRFRIDGISRVKRLTRVVAEEDEGHPLLPSSYVVKFSEIIFPTDFIVGAADLSWILKYWRIFNTTRRVSYRWISQLIALLIYAVLLMPSFIKVGYYYFFSRHVIRSVIYGEQPRNRLDLYIPKGNSKSSSVVAFVTGGAWIIGNFPQGTISDMVSDASEAISFICNNVVSFGGDPNKIYLMGQSAGAHIAACALLEQAIKESKGENTYWDVAQMKAYFGLSGGTIYRTNIDKKVTEADLKLFFESICGELKVCRNGTIKIDLETNKIMDFIKFDVGNVVMVTGGRNTGRVAVIKNREKHKGSFETIHVLFGAFCYV

SEQ ID NO: 83427 - protein, 108 aa, Zea mays
  Coding DNA Sequence Number=SeqID_41648
MATRRLRPQPTGSQTVSHGVDLEEGGGGCLLSDPPLHHSRSVSPADSESMGLHGSRGSPESWQRKMKVTLRFLRRLEQFELGRVRVWSPNKRLNLSIYKIWLGFHQCP

SEQ ID NO: 83428 - protein, 91 aa, Zea mays
  Coding DNA Sequence Number=SeqID_41649
MGKPSPSLLMLLLCRVTALVPTITGMGDHVSGRVRGKVCGQVHSGLAFQSWGRQILDGRLWCWLLGYLLSNSLLRNEDVFPVSEIIVYRMQ

SEQ ID NO: 83429 - protein, 85 aa, Zea mays
  Coding DNA Sequence Number=SeqID_41650
MGKPSPSLLMLLLCRVTALVPTITGMGDHLLGRVRGKVCGQVHSDNQSPWIVVHRPTSLWYENGYNQFPDLARVLEKSLDFYRDP

SEQ ID NO: 83430 - protein, 56 aa, Zea mays
  Coding DNA Sequence Number=SeqID_41651
  Homolog annotation: Hit_ID=Q337H4; Match level="QueryCoverage=87%, HitCoverage=5%, E-value=4e-14, Identity=72%"; Hit description =Expressed protein
MEKACLSVVALEDTSDMVLELGGNFKETLRQLGGLDDIFNVMVNCHSELEYTGAAI

SEQ ID NO: 83431 - protein, 275 aa, Zea mays
  Coding DNA Sequence Number=SeqID_41652
  Homolog annotation: Hit_ID=Q337H4; Match level="QueryCoverage=65%, HitCoverage=20%, E-value=4e-62, Identity=67%"; Hit description =Expressed protein
MEINSLATAPDSSSLNKENLCSLFDLAMKLFYHDKVCFEKLVKIAMLSLCSQQASINHHGFYVEHLLLVQQIIDAILVLDIDDPPCAIAAGALLFVLASDVQDNNLLSSETCVHFLLKLLNPPVNVVDAKAPSIGSKLLGIGKFQMLNGSNKDVDSCSEDILSKVEEILLSCKEIKPADRDYKRTTRPELCSKWLALLTMEKACLSVVALEDTSDKVLELGGNFKETLRQLGGLDDIFNVMVNCHSELEYTWSCNLMNIILSNMKNMLQDKDMLQ

SEQ ID NO: 83432 - protein, 217 aa, Zea mays
  Coding DNA Sequence Number=SeqID_41653
  Homolog annotation: Hit_ID=Q337H4; Match level="QueryCoverage=66%, HitCoverage=16%, E-value=2e-30, Identity=55%"; Hit description =Expressed protein
MILRTYGRRSRSFSDGGGGVSSSQDAFDCDDAADLLVSSASQPLPLPPSQESSSMWDFDEDPPPSPPRPRPEGRRRGARRGGWELAEAPAVAPTATLMEAEEYGEMMESVDEVTFALDGLRPAAQKRTRRASLLALLGICASAERRRVLRSQGLVQQIIDAILVLDIDDPPCAIAAGALLFVLASDLQPLLSHYNATCFHIARLACSIKESNKKHHD

SEQ ID NO: 83433 - protein, 198 aa, Zea mays
  Coding DNA Sequence Number=SeqID_41654
MGASTSSHPPLLVPRRRPSGRGRGGDGGGSSSKSHIEEDSCDGGSGSGCEADDTSKSAASSQSNASCEDETPPAVGEGAGSAHVRTTSAPPPRRSRRRLGVPSPRRRRASSPLCLAVVRVGGQKPDTSKEGGGRTSRSGGDHAMREVAALFPDDPRGSFTTLMADPVPHRKDMRDGGASTPTAMAPAPSTPSVRLKGK

SEQ ID NO: 83434 - protein, 239 aa, Zea mays
  Coding DNA Sequence Number=SeqID_41655
  Gene Ontology: Mol. function=heat shock protein binding; Cellular component=membrane; Biological process=protein folding
  Homolog annotation: Hit_ID=Q0PMD7; Match level="QueryCoverage=71%, HitCoverage=41%, E-value=3e-73, Identity=77%"; Hit description=J -domain protein
  Pfam annotation: Domain name=DnaJ_C; Domain location=71-180; Score =8.8; E_value=3.5e-07; Accession=PF01556.9; Description=DnaJ C terminal region
MELLSQPTDKPFRTEHMRRLEFAFWFKVSTPPRRSGGRRSRIGRSETHKRWLRRELGITNDVTSLLQPDTATGDIIFVLQQKEHPKFKRKGDDLFHKHTLTLTESLCGFQFVLAHLDNRQLLIKSNPGEVVKPGSFKTINDEGMPMYQWPFMKGKLYIHFSVEFPNSLSPEQCKALEVVLPPKPVSQYTDMELDECEETMPYDVNIEEEMRRRQQQHQEAYDEDDDVPSGGQRVQCAQQ

SEQ ID NO: 83435 - protein, 154 aa, Zea mays
  Coding DNA Sequence Number=SeqID_41656
  Gene Ontology: Mol. function=pepsin A activity; Biological process =proteolysis
MSGSLVLGGIGGGEGMQYVPLVKSAASDKLSYDMYYYLVLRGVTVGGKAVRLSAQAFAANAAGSEGAIVDSGTTFTYLDPTVFQPVADAVVTAVGGGYKRSKDTEVGLGLHPYFALPQGASQPTDKPFRTEHIRRLEFSFWFKVSARGKAQALT

SEQ ID NO: 83436 - protein, 206 aa, Zea mays
  Coding DNA Sequence Number=SeqID_41657
  Homolog annotation: Hit_ID=Q9SIK2; Match level="QueryCoverage=27%, HitCoverage=51%, E-value=5e-18, Identity=80%"; Hit description=40S ribosomal protein S25-2
  Pfam annotation: Domain name=Ribosomal_S25; Domain location=85-186; Score=196.4; E_value=6.5e-56; Accession=PF03297.5; Description=S25 ribosomal protein
MEEVDEHEGQHGIISRKHLKEMSIMLHVKEAESPIMLSVKFKERRCLRDEERAMVAARHEEQAILVECKAGSPPPCGKRKDRTNMAPKKDKAPPPSSKPAKSGGGKQKKKKWSKGKLKEKVNNAVLFDQATYDKLLSEVPKYKQITPSILSERLRINGSLARRAIKDLMARGLIRMEELVFRTVAIFVKSCQCYVTGDEFQVTATF

SEQ ID NO: 83437 - protein, 183 aa, Zea mays
  Coding DNA Sequence Number=SeqID_41658
  Gene Ontology: Mol. function=protein disulfide isomerase activity; Cellular component=endoplasmic reticulum; Biological process=cell redox homeostasis
  Homolog annotation: Hit_ID=P52588; Match level="QueryCoverage=63%, HitCoverage=23%, E-value=3e-33, Identity=63%"; Hit description =Protein disulfide-isomerase precursor
  Pfam annotation: Domain name=Thioredoxin; Domain location=42-133; Score=43.5; E_value=7.1e-10; Accession=PF00085.10; Description =Thioredoxin
MRRRIHQRPELAFQELRTSEPVRAELDAIGIPYRWLVARIGVVATIAGAAARPIVALQADMDYENVAKALSKHDPPIVLAKVDANEEKNMPLATKYEVQGFPTIKIFRDQGKNIQEYKGPREADGIVDYLKKQDEMEEVDEHEGQHGIISRKHLKEMSIMLHVKEAESPIMLSVKFKESSVST

SEQ ID NO: 83438 - protein, 75 aa, Zea mays
  Coding DNA Sequence Number=SeqID_41659
MDRPIPAITDGKPHLVVIARTSRSQPHPSPDLPRCRITHRGSLEDMVAGVTWPSTLPPGWIVEWDPTSAEEEHEE

SEQ ID NO: 83439 - protein, 87 aa, Zea mays
  Coding DNA Sequence Number=SeqID_41660
MDRPIPAITDGKPHLVVTARTSRSQPHPSPDLPRCQITHRDCNLADGEYILIPEQGVAQEVAQEPAPESAIEDLPAPALEGKPRFYA

SEQ ID NO: 83440 - protein, 470 aa, Zea mays
  Coding DNA Sequence Number=SeqID_41661
  Subcellular localization annotation: CTP_CleavageSite=75; ConfidenceScore=5.40e-01
MVDIDHRMAGLAPSVAHTAALRRLSTRAAAGPSSASASPRHGLHSFHAVAAGVLSHLRESGVAVLPGLSDAELVRAEAEFGFTFPPDLRAVLALGVPSGPGFPDWRGRAGLRAAFDLPAAAASLQVARGALWPRCWGRRPADPGRALRLARSAVRRAPPLVPLFDRCYLPCRPCLAGNPVFFVADDRVLCCGLDLLYFFTRDSSFQPADRAVVSSSSPLSAGASRPSCTRRSLDAVQAPRWIEFWSDAASDRRRRDSSSSEASTASSSSSSSSSSGCPSPPRRPTPRWVDSYLDELGSMLKKGGWRDREVDEMVEVTASGFLDDGEEAPTPDSEAILDALVLKTDRCSDSLRRAGWTAEDVSDALGLDFRRGEERSRSAVRIPPEIAAKDPRREMRAKLAEKTHLQLKTLHTLQRTGTPAVARQPLMNRRCYRWEGEAHGVALRLAPAHSRVSDMRVDTVMDMDSAHAQF

SEQ ID NO: 83441 - protein, 412 aa, Zea mays
  Coding DNA Sequence Number=SeqID_41662
  Gene Ontology: Mol. function=protein serine/threonine kinase activity; Cellular component=calcium- and calmodulin-dependent protein kinase complex; Biological process=protein amino acid phosphorylation
  Homolog annotation: Hit_ID=O82107; Match level="QueryCoverage=99%, HitCoverage=67%, E-value=0.0, Identity=86%"; Hit description=Calcium- dependent protein kinase
  Pfam annotation: Domain name=Pkinase; Domain location=155-400; Score =260.4; E_value=3.6e-75; Accession=PF00069.15; Description=Protein kinase domain
  Pfam annotation: Domain name=Pkinase_Tyr; Domain location=155-401; Score=-41.1; E_value=6e-10; Accession=PF07714.7; Description=Protein tyrosine kinase
  Pfam module annotation: Pfam domain module=Pkinase::Pkinase_Tyr; Domain location=155-400::155-401
  Subcellular localization annotation: CTP_CleavageSite=36; ConfidenceScore=5.03e-01
MGNTCVGPSITMNGFFQSVSTALWKTPQDSDALPAAAANGPGGASPGRSQSALPKPASDVHHHIAVLSEAPEPVKIGAYHSEPAPAVQSEAPEPVKIAASHSEPAPMAAKPGAAAANASPSPSPRPRPQVKRVSSAGLLVGSVLRRKTENLKDKYSLGRRLGQGQFGTTHLCVERGTGKELACKSILKRKLATDDDVEDVRREIQIMHHLAGHPSVVAIRGAYEDAVAVHLVMELCGGGELFDRIVRRGHYTERKAAELARVIVGVVEACHSMGVMHRDLKPENFLFADHSEEAALKTIDFGLSIFFRPGQIFTDVVGSPYYVAPEVLKKRYGPEADVWSAGVIIYILLCGVPPFWAENEQGIFEEVLHGRLDFESEPWPSISDGAKDLGIRGFRSVEWLLTGRWTRPFCLA

SEQ ID NO: 83442 - protein, 669 aa, Zea mays
  Coding DNA Sequence Number=SeqID_41663
  Gene Ontology: Mol. function=protein serine/threonine kinase activity; Cellular component=cytoplasm; Biological process=protein amino acid phosphorylation
  Homolog annotation: Hit_ID=O82107; Match level="QueryCoverage=99%, HitCoverage=97%, E-value=0.0, Identity=83%"; Hit description=Calcium- dependent protein kinase
  Pfam annotation: Domain name=Pkinase; Domain location=155-429; Score =317.2; E_value=3e-92; Accession=PF00069.15; Description=Protein kinase domain
  Pfam annotation: Domain name=Pkinase_Tyr; Domain location=155-427; Score=-38.8; E_value=4.3e-10; Accession=PF07714.7; Description =Protein tyrosine kinase
  Pfam annotation: Domain name=efhand; Domain location=476-504; Score =38.8; E_value=1.8e-08; Accession=PF00036.22; Description=EF hand
  Pfam annotation: Domain name=efhand; Domain location=545-573; Score =8.5; E_value=1.6; Accession=PF00036.22; Description=EF hand
  Pfam annotation: Domain name=efhand; Domain location=581-609; Score =33.2; E_value=9.1e-07; Accession=PF00036.22; Description=EF hand
  Pfam annotation: Domain name=efhand; Domain location=615-643; Score =34.5; E_value=3.6e-07; Accession=PF00036.22; Description=EF hand
  Pfam module annotation: Pfam domain module=Pkinase::Pkinase _Tyr::efhand::efhand::efhand::efhand; Domain location=155-429::155 -427::476-504::545-573::581-609::615-643
  Subcellular localization annotation: CTP_CleavageSite=36; ConfidenceScore=5.03e-01
MGNTCVGPSITMNGFFQSVSTALWKTPQDSDALPAAAANGPGGASPGRSQSALPKPASDVHHHIAVLSEAPEPVKIGAYHSEPAPAVQSEAPEPVKIAASHSEPAPMAAKPGAAAANASPSPSPRPRPQVKRVSSAGLLVGSVLRRKTENLKDKYSLGRRLGQGQFGTTHLCVERGTGKELACKSILKRKLATDDDVEDVRREIQIMHHLAGHPSVVAIRGAYEDAVAVHLVMELCGGGELFDRIVRRGHYTERKAAELARVIVGVVEACHSMGVMHRDLKPENFLFADHSEEAALKTIDFGLSIFFRPGQIFTDVVGSPYYVAPEVLKKRYGPEADVWSAGVIIYILLCGVPPFWADFLANLLLTAPVCRRAENEQGIFEEVLHGRLDFESEPWPSISDGAKDLVRRMLVRDPRKRLTAHEVLRHPWVQVGGVAPDRPLDSAVLSRMKQFSAMNKLKKMALRVIAENLSEDEIAGLREMFKMIDADNSGQITFEELKVGLEKVGANLQESEIYALMQAVSAPHLVPVLVTGTVTASAEGKLAVAAFVRGAQADVDNNGTIDYGEFIAATLHLNKVEREDHLFAAFQYFDKDGSGYITADELQVACEEFGLGDVQLEDLIGEVDQDNDGRIDYNEFVAMMQKPTVGVLPKKADLQNSFSIGFREALRMA

SEQ ID NO: 83443 - protein, 100 aa, Zea mays
  Coding DNA Sequence Number=SeqID_41664
MQYSPIAPGLGSGRENRKFMHQGKDGLAFVEAFLAQKTYFRKFGLWSLFRGYGFRINGDGVAVGPTCQREREGEENGVRLTGGNEPAVRGEDPAAGGLGG

SEQ ID NO: 83444 - protein, 116 aa, Zea mays
  Coding DNA Sequence Number=SeqID_41665
MQYSPIAPGLGSGRENRKFMHQGKDGLAFVEAFLAQKTYFRKFGLWSLFRGYGFRINGDGVAVGPTCQREREGEENGVRLTGGGDEPAVRGEDPAAGGLGGGSPPVARFLDSEQMP

SEQ ID NO: 83445 - protein, 256 aa, Zea mays
  Coding DNA Sequence Number=SeqID_41666
MAGEDCRSGAEMDALVRRLKLHRPSPSPYDPDPAAAPVPATAGDGELFRPRRAAVLVCLFRGDGGELRVILTKRSSSLSTHSAASRHRALQLSRPDADAIARSRPPAAIAPKRRVADAIAPGAASRQTPSVALQAPEDFDWDNEWVDPLANSSHVSNALGDGFNLSWDQVDEAIGASAHLRGRNFPRRAAGGCVRRNEDLEEEETNLANEDDEDEEYILDDLDVEDEIEGSNSGNDGDDQGVDAHGLNIDEFGDGY

SEQ ID NO: 83446 - protein, 134 aa, Zea mays
  Coding DNA Sequence Number=SeqID_41667
  Homolog annotation: Hit_ID=Q8RZI8; Match level="QueryCoverage=24%, HitCoverage=13%, E-value=4e-07, Identity=66%"; Hit description =Putative mitochondrial import receptor subunit TOM20
  Pfam annotation: Domain name=TOM20_plant; Domain location=9-96; Score= -131.5; E_value=0.066; Accession=PF06552.3; Description=Plant specific mitochondrial import recep
MEMGGMSDAERLFFFEMACKNSEVAYEQNPNDAADGRLPVHQIARMEGPPAPRRSRKSAPHVQLGPHRRRRPRGRIAPAPRATNARGWKVAPPNRADGRSTTSSSPQIVHPPRPQIRDGRGRLPLLCPTSRETR

SEQ ID NO: 83447 - protein, 505 aa, Zea mays
  Coding DNA Sequence Number=SeqID_41668
  Homolog annotation: Hit_ID=Q9ATM3; Match level="QueryCoverage=19%, HitCoverage=39%, E-value=2e-23, Identity=62%"; Hit description=Small basic membrane integral protein ZmSIP1-1
MADRFQKIREEGKNLDPLILEDFDWDNEWVDPLANSSHVSNALGDDFNLSWDQVDEAIGAFAHLRGRNFPRRAAGGCVRRNEDLEEEETNLANEDDEDEEYILDDLDVEDEIEGSNSGNDGDDQCVDAHGLNIDEFDDGLVLPSRDRLPPRQLRKSAAPLPQIPRACPARLAFPAPGPSASNARGWKVHLLLAAPTNQPRRSSSARIAVAVLALATPADGRLRHQIARMEGPRSLLAITAPAPPSSSPQIVHPSRPQIPLAFNSISAVDAPADGRSQISSRHYRARPQLWSHNMVHDVSSESLPSSSVHNSGQAPLPLPAEAPSDLDSGDVPAGPAHPAYTVVEAPPDPDVRSRVAARGSGAGAAADQILAKSTLGTPLSPPSLHDGVPQPPLNGRRITASACSWAPLSINWAAADAMVTFLWVLCASALDVSIAAVTSYQGLQEGTGHYALLVTTSLLSVLLFTFDLLYGVLGGASFNFTDFATSYSAGLDSPSLFSVALHFLA

SEQ ID NO: 83448 - protein, 286 aa, Zea mays
  Coding DNA Sequence Number=SeqID_41669
MVGLLMPSSWLPHMISLVLRSPPDTLAADLALDGVLVRERQHDMAPEGLDEAVCECDEVRQSIGMRRRRWRCRRRAEQARSAETEAWRTTVDPRRWLRVAAGIVAAAARAVAGVDGAGGLPVGAGEWGGGAARLGCEARGSAPGCRAELVAWRAGEGVEHYDVHGDRHTVSAAVVETSSAEAHNTHKNVTMASAAAARTVAPITICVCVGVGLLRFYLPRLRLDQKSIDRAPQLTEAVGLRPMPSLMIRTYLRKEKRNQPPASRKGGVEDTYDCLDRGRGLRGVGA

SEQ ID NO: 83449 - protein, 92 aa, Zea mays
  Coding DNA Sequence Number=SeqID_41670
  Subcellular localization annotation: CTP_CleavageSite=40; ConfidenceScore=5.40e-01
MAGGFKLAGAKGKWLAGEGTGSCSVTKVPVSECLVPRLSCAKTVSNEFGLSSNFPRMCSSLEKQRTQMIFEKRSEIQKFRNLNFSKGSLIKG

SEQ ID NO: 83450 - protein, 92 aa, Zea mays
  Coding DNA Sequence Number=SeqID_41671
  Subcellular localization annotation: CTP_CleavageSite=40; ConfidenceScore=5.36e-01
MAGGFKLAGAKGKWLAGEGTGSCSVTKVPVSECLVPRLSCAKTVSKEFGLSSNFPRMCSSLEKQRTQMIFEKRSEIQKFRNLNFSKGSLIKG

SEQ ID NO: 83451 - protein, 92 aa, Zea mays
  Coding DNA Sequence Number=SeqID_41672
  Subcellular localization annotation: CTP_CleavageSite=58; ConfidenceScore=5.46e-01
MAGGNKLAGAKGKWLAGEGTGSCSVTKVPVSECLVPRLSCAKTVSKGFGLSSNFPRMCSSLEKQRTQMIFEKRSEIQKFRNLNFSKGSLIKG

SEQ ID NO: 83452 - protein, 92 aa, Zea mays
  Coding DNA Sequence Number=SeqID_41673
  Subcellular localization annotation: CTP_CleavageSite=58; ConfidenceScore=5.41e-01
MAGGIKLAGAKGKWLAGEGTGSCSVTKVPVSECLVPRLSCAKTVSKGFGLSSNFPRMCSSLEKQRTQMIFEKRSEIQKFRNLNFSKGSLIKG

SEQ ID NO: 83453 - protein, 92 aa, Zea mays
  Coding DNA Sequence Number=SeqID_41674
  Subcellular localization annotation: CTP_CleavageSite=58; ConfidenceScore=5.41e-01
MAGGIKLAGAKGKWLAGEGTGSCSVTKVPVSECLVPRLSCAKTVSKGFGLSSNFPRMCSSLEKQRTQMIFEKRSEIQKFRNLNLSKGSLIKG

SEQ ID NO: 83454 - protein, 92 aa, Zea mays
  Coding DNA Sequence Number=SeqID_41675
  Subcellular localization annotation: CTP_CleavageSite=40; ConfidenceScore=5.22e-01
MAGGFKLAGAKRKWLAGEGIGSCSVTKVPVSECLVPRLSCAKTVSNEFGLSSNFPRMCSSLEKQRTQMIFEKRSEIQKFRNLNFSKGSLIKG

SEQ ID NO: 83455 - protein, 92 aa, Zea mays
  Coding DNA Sequence Number=SeqID_41676
  Subcellular localization annotation: CTP_CleavageSite=40; ConfidenceScore=5.46e-01
MAGGFKLAGAKGKWLAGEGTGSCSVTKVSVSECLVPRLSCAKTVSNEFGLSSNFPRMCSSLEKQRTQMIFEKRSEIQKFRNLNFSKGSLIKG

SEQ ID NO: 83456 - protein, 120 aa, Zea mays
  Coding DNA Sequence Number=SeqID_41677
MMMHPPGLFPAEKRDDPMWCNRVSHMKDVWAMHPDLVGRIIVQCMSALYHLKALQSDAMMHLTGLAQAAKITLDDREDFMVDLSSELVEKDLQVEQMRNCIQALEQQVEIRDNTIDILEN

SEQ ID NO: 83457 - protein, 39 aa, Zea mays
  Coding DNA Sequence Number=SeqID_41678
MTSFYGYHPLEMMMHPLGLFPAEKREDPMWCNKSCKAMP

SEQ ID NO: 83458 - protein, 157 aa, Zea mays
  Coding DNA Sequence Number=SeqID_41679
MTKVILAEDVQNSRNGSEFTEEIISNYKCTFGLLEGKGTSVTQKLMPNQREQYRDTVHLFIGTGRSPWKITIMSFTFINNSMITLRGLIWFFIFKSVSFSAATSKLFYTQLRLCAILCTSSYRGSDPDPKDREMMIVQVMWCQQQDAVGGQPKEGWT

SEQ ID NO: 83459 - protein, 109 aa, Zea mays
  Coding DNA Sequence Number=SeqID_41680
MQSVDDPRKDGHNQWMLAKRVPPPEDAAESDLGIERVRSNPRQLQPTTVKELRELKRFFSSLVTGVIAARLANGRPRKGHEIVDCAVFGVHWIIRCTRGQKAIRAYSTG

SEQ ID NO: 83460 - protein, 96 aa, Zea mays
  Coding DNA Sequence Number=SeqID_41681
MEAKSHQQQIILRSTCKNCATSKVEYTNTQLDLPVTALVGVAGMGDHVSGRVRGKVHCEVHSVFAGGGTRLASIYWLCPSFLGSSTDCILWLAPHH

SEQ ID NO: 83461 - protein, 198 aa, Zea mays
  Coding DNA Sequence Number=SeqID_41682
MKKVVYYETDSSSPSTSSTESTTSKRQERKKAHLMLRRHIARQWNGQATCLIRIKCRGRMAKRPYVRLHPLAYVTGSWPRGSNRSPPEWGAEAYAVWSGHVSAPDPHLALTKVRVLFVPEPRDPVVSDPDPTQRGVRYFPWGFGPTVDTLEDIAFSGHVAALEELVPKEDDSWARAPVSKAGPLLSAEMKRRDGSLLA

SEQ ID NO: 83462 - protein, 170 aa, Zea mays
  Coding DNA Sequence Number=SeqID_41683
MGVRTYRRYLGGYRLLWPRGGLGAARVVGSGAVCHATRDSHVDSAPSYCSKGYPYSRVLTKTKEIYPSSGRRRLLPMGVEGLYYLAPKRSVGVTSSRDRECVPSLFSMIEAECQYQGGDVFGPCSGVAGEMALVLMSEPYSGMADGIALFLTSSFSQEVVRSLYPVLLTG

SEQ ID NO: 83463 - protein, 116 aa, Zea mays
  Coding DNA Sequence Number=SeqID_41684
  Subcellular localization annotation: CTP_CleavageSite=66; ConfidenceScore=5.01e-01
MAQWLTRSTLAGGRMESGDRGLASPAKQTSIPRSGSFTEVQARTMASAGLWRDAGHARSGAGVLWRAQNASNTWKCSSARVQTPADIANVRILAKIRRRPLPGTYGYLPYVNTVDL

SEQ ID NO: 83464 - protein, 72 aa, Zea mays
  Coding DNA Sequence Number=SeqID_41685
MASVGLWRDARHAMSGAGVLWRAQNASNTWKCSSARVQMPAEIANVRILAKIRRRPLPGTYGYLPYVNTVDL

SEQ ID NO: 83465 - protein, 153 aa, Zea mays
  Coding DNA Sequence Number=SeqID_41686
  Subcellular localization annotation: CTP_CleavageSite=33; ConfidenceScore=5.23e-01
MAQWFTRSTLAGGRMVSGDRGLASPAKQTSIPRSGSFTEVCSVFSEGRTGLDGLGWPVYGGRGSGGRGHVVHGQTPARAWTMASAGLWRDAGHARSGAGVLWRAQNASNTWKCSSARVQTPAEIANVRILAKIRRRPLPGTYGYLPYVSSKGR

SEQ ID NO: 83466 - protein, 76 aa, Zea mays
  Coding DNA Sequence Number=SeqID_41687
MASAGLWRDAGHTRSGAGVLWRAQNASNTWKCSSARVQMPAEIANVRILAKIWHRPLPGTYGYLSYVNKLLNLVPK

SEQ ID NO: 83467 - protein, 183 aa, Zea mays
  Coding DNA Sequence Number=SeqID_41688
  Pfam annotation: Domain name=Rtt106; Domain location=8-144; Score= -19.9; E_value=0.1; Accession=PF08512.2; Description=Histone chaperone Rttp106-like
  Subcellular localization annotation: CTP_CleavageSite=26; ConfidenceScore=5.06e-01
MSYGGREVQQLFLKIKTSGKLLRYCRCFGSDRTPGVAPQGVFRSRTVSITVAKWFVPIARGTVDKVYRNWHEAIRIMLRRSALCHQYYASEVWTYIRAVERSELEGSDESEYSSDEEDSDGGGEDEDDDDDDDDDGDGDGSGRGGGGGSKDGDSGGSRGSNRGDSSRGSTRGGSGGGSNRASG

SEQ ID NO: 83468 - protein, 329 aa, Zea mays
  Coding DNA Sequence Number=SeqID_41689
  Homolog annotation: Hit_ID=Q5JLN0; Match level="QueryCoverage=29%, HitCoverage=24%, E-value=5e-32, Identity=63%"; Hit description =Lysine ketoglutarate reductase trans-splicing related 1-like
RRVHARAERPLRRDSVGPPCEGWVEVMVPVFSRAAWRCVWGMLQNDLIHGWGLDYRLGYCAQGGRARNVGVVDSEYVLHRGVPMLIDGGTATPSAGRAAVRLRSFKEMQLTYPCSVPMYEAPAWEVCLLLRHLHISYCHLLLTLFSSSTPPWARARKVGVPHHSGDKRKREPTPPSEDFGDSEYSEEEFSSESEDSPVHGSPPVSYDDSDDSQGIAAEVWTYIRAVERAGLEGSDESEVSSDEEGGGGGDGEGDRDDGGDGDGGGDDGGGEGGGKGGSCRCFGSDHTPGVAPQGVFRSRMVSTTVAKWFVPIARGTVDKVYRFRPLRDA

SEQ ID NO: 83469 - protein, 158 aa, Zea mays
  Coding DNA Sequence Number=SeqID_41690
MRKWARPGPLLLLLLSCRSNIPLDRPTRWQGGRPSHTINQILHGTCKNGATSKAEYTNTQLDLTVTALVPTIASMGDPVSGRMRDKVRARLHSGTRFTGYHFSRHVLSTFKSLTQVLLEISTLKVYDLLELNKVNFAYGRRGALNYNYYLTVGCHNMT

SEQ ID NO: 83470 - protein, 67 aa, Zea mays
  Coding DNA Sequence Number=SeqID_41691
MGDPVSGRMRDKVRARLHSGTRFTGYHFSRHVLSTFKSLTQGLRGDPQQQPQKLAPGPPLGQILARG

SEQ ID NO: 83471 - protein, 213 aa, Zea mays
  Coding DNA Sequence Number=SeqID_41692
  Gene Ontology: Mol. function=acetylornithine transaminase activity; Biological process=amino acid biosynthetic process
  Homolog annotation: Hit_ID=Q6ZCF0; Match level="QueryCoverage=43%, HitCoverage=18%, E-value=3e-42, Identity=87%"; Hit description =Putative gamma-aminobutyrate transaminase subunit isozyme 3
  Subcellular localization annotation: CTP_CleavageSite=60; ConfidenceScore=5.30e-01
MEWKQKVSLFDVVDETSVSTKLGRAASNGVTATATGGNSYVSRWNGRPTRTALRDPREASCSLYGSRRRSFFTPSTTTRPSSLSVKLEAERQLRSSLSMCKTTTLITLGSYVYDINGNKYLDSLAGLWCTALGGSEPRLVKAATEQLNKLPFYHSFWNRTTKPSLDLAQEILSMFTAREMGKVFFTNSGSEANDSQVSLFYSPSVPSMITESV

SEQ ID NO: 83472 - protein, 164 aa, Zea mays
  Coding DNA Sequence Number=SeqID_41693
  Gene Ontology: Mol. function=nucleoside-triphosphatase activity
  Homolog annotation: Hit_ID=Q10MC7; Match level="QueryCoverage=58%, HitCoverage=13%, E-value=4e-18, Identity=65%"; Hit description=Pre -mRNA splicing factor ATP-dependent RNA helicase, putative, expressed
  Subcellular localization annotation: CTP_CleavageSite=60; ConfidenceScore=5.29e-01
MEWKQKVSLFDVVDETSVSTKLGRAASNGVTATATGGNSYVSRWNGRPTRTALRDPREASCSLYGSRRRSFFTPSTTTRPSSLSVKLEAERQLRSLRRWFPFDPSPLPLVGPLLLVAVQELQRDTDSPTSKARSYVYDINGNKYLDSLQDYGATALRLCHGDFC

SEQ ID NO: 83473 - protein, 83 aa, Zea mays
  Coding DNA Sequence Number=SeqID_41694
MYFRQNLQGVTEGGAINDEIDEALFPNRDGKEEASKGRFKESREIGIRTKDISTTKDGVKTGPASRKEVGTSKGQIGKLPLSS

SEQ ID NO: 83474 - protein, 89 aa, Zea mays
  Coding DNA Sequence Number=SeqID_41695
MSIIKDGVKARIVTGKGENATKVGIGVEEGGAIDDEIDEALSPNRDGNEEASKGRFNVPSDSDQNHSVKKHKEYEGWRRAEAMRRGALA

SEQ ID NO: 83475 - protein, 69 aa, Zea mays
  Coding DNA Sequence Number=SeqID_41696
GVTEGGAINDEIDEALFPNRDGKEEASKGRFKVEDINIARVKGDNRQGCNREEVKVHKNQGYEYNKEWS

SEQ ID NO: 83476 - protein, 108 aa, Zea mays
  Coding DNA Sequence Number=SeqID_41697
MAGPPDTTASHLAHGVMTRGLEIANWIGARGKGVDRKGGAINDEIDEALFPNRDGKEEASKGRFKESREIGIRTKDISTTKDGVKTGPASRKEVGTSKGQIGKLPLSS

SEQ ID NO: 83477 - protein, 242 aa, Zea mays
  Coding DNA Sequence Number=SeqID_41698
  Gene Ontology: Mol. function=dolichyl-diphosphooligosaccharide -protein glycotransferase activity; Cellular component=endoplasmic reticulum membrane; Biological process=protein amino acid N-linked glycosylation via asparagine
  Homolog annotation: Hit_ID=Q9LVR2; Match level="QueryCoverage=79%, HitCoverage=51%, E-value=8e-59, Identity=56%"; Hit description =Dolichyl-di-phosphooligosaccharide-protein glycotransferase (Oligosaccharyltransferase)-like
  Pfam annotation: Domain name=DDOST_48kD; Domain location=13-242; Score=-127.6; E_value=4.8e-08; Accession=PF03345.5; Description =Dolichyl-diphosphooligosaccharide-protein glycosyltransferase 48kD subunit
MATRCHVLLLLAAAFASLLALVAAEGGEEGPRGRRLLVLLDDLAVRSSHSAFFGSLQARGFDLDFRLADDPKLSLHRYGQFDGNRDGLRAESDCFSDLTRTRGVEFCDLLRDPEAMVIDHMNYAVTDVEGDHTLIAGDDLIHSDVILGSEKIEAPVLFRGIGHMANPSNSLVLKVLSASPSAYSANPKTKLASPPSLTGSAISLVSVMQARNNARVLLSGSLDLFSNRFLKSGVQKADSKTS

SEQ ID NO: 83478 - protein, 162 aa, Zea mays
  Coding DNA Sequence Number=SeqID_41699
  Gene Ontology: Mol. function=dolichyl-diphosphooligosaccharide -protein glycotransferase activity; Cellular component=endoplasmic reticulum membrane; Biological process=protein amino acid N-linked glycosylation via asparagine
  Homolog annotation: Hit_ID=Q9LVR2; Match level="QueryCoverage=96%, HitCoverage=37%, E-value=3e-48, Identity=63%"; Hit description =Dolichyl-di-phosphooligosaccharide-protein glycotransferase (Oligosaccharyltransferase)-like
FDGNRDGLRAESDCFSDLTRTRGVEFCDLLRDPEAMVIDHMNYAVTDVEGDHTLIAGDDLIHSDVILGSEKIEAPVLFRGIGHMANPSNSLVLKVLSASPSAYSANPKTKLASPPSLTGSAISLVSVMQARNNARVLLSGSLDLFSNRFLKSGVQKADSKTS

SEQ ID NO: 83479 - protein, 150 aa, Zea mays
  Coding DNA Sequence Number=SeqID_41700
MGKGTKRKREPTPPSDDFGDSEYSEEEFSSESEGSPAPVSPPASSDDSDDSQGIAAEVWTYIRAVERSGLEGSDESEFSSEEEDSDGDEGEDDDDDDDDGDGDGSGGGSGGGEVSKGGTKDGSSVGSTGGGGSKGGTRGGGGGSSSKASG

SEQ ID NO: 83480 - protein, 150 aa, Zea mays
  Coding DNA Sequence Number=SeqID_41701
MGKGTKRKREPTPPSDDFGDSEYSEEEFSSESEGSPAPVSPPASSDDSDDSQGIAAEVWTYIRAVERSGLEGSDESEFSSEEEDSDGDEGEDDDDDDDDGDGDGSGGGSGGGEVSKGGTKGGSSVGSTGGGGSKGGTRGGGGGSSSKASG

SEQ ID NO: 83481 - protein, 129 aa, Zea mays
  Coding DNA Sequence Number=SeqID_41702
  Gene Ontology: Mol. function=protein serine/threonine kinase activity; Cellular component=membrane; Biological process=protein amino acid phosphorylation
  Homolog annotation: Hit_ID=Q1RSI5; Match level="QueryCoverage=51%, HitCoverage=5%, E-value=5e-25, Identity=73%"; Hit description =Octicosapeptide/Phox/Bem1p; Protein kinase
MEYLHSKDIIHFDLKCDNLLVNLNDPSRPICKVADFGLSNLEKTTMVSGGMRGTLPWMAPEMLETSSDSWFTALANGPFCFAAGSSFVGEVIAGVDMVLPPLLLSLSMLELRLPYQQTWKSSVDDLVLP

SEQ ID NO: 83482 - protein, 231 aa, Zea mays
  Coding DNA Sequence Number=SeqID_41703
  Subcellular localization annotation: CTP_CleavageSite=71; ConfidenceScore=5.34e-01
MARRPQSRFCQVRGSTALLPLPAINLHHCAASLTAAVSISTSCSSFSASPTTSYPSSSHSQRHQPQRPVVTSSSVSPPAGWLRTASGPGPGSDATHTSPGARRIPPDAISARHAMPQKPVHGCCSNPFRGCRIIPTDAAPPQVVLLRRRVRPSGCVGLGGTDGYGASSITFVTINAGVETGREKNLKFIVQVWFFIIYTMVGIEMPTIKVRSAIVASPPSSIASSIVNMPE

SEQ ID NO: 83483 - protein, 254 aa, Zea mays
  Coding DNA Sequence Number=SeqID_41704
  Homolog annotation: Hit_ID=P21616; Match level="QueryCoverage=23%, HitCoverage=7%, E-value=9e-13, Identity=66%"; Hit description =Pyrophosphate-energized vacuolar membrane proton pump (EC 3.6.1.1) ...
  Homolog annotation: Hit description=(Pyrophosphate-energized inorganic pyrophosphatase) (H(+)-PPase) (Vacuolar H(+) -pyrophosphatase)
MTSDYSQPPTEARERQQHPCRTTSYASTGLKALPRQPPDVQLTELGDLILYDADGTLDWSTNTSGKSVVGATCGAETHSKYLSYKLGQRKVVRISQCFPTASCGEYGVFSNAQCSFPDAGLRQSGLFKLIDPGEINRGCVTLDRFSTLWWVLVSKVWLAPERRADDGGAIKSDPCDYLIEEEEGLNDHNVVVKCAEIQNAISEAEDTTSAVPDSWETADIDGHMSRLILSACRVSSSLDLAFSTKKTVTSVTRG

SEQ ID NO: 83484 - protein, 244 aa, Zea mays
  Coding DNA Sequence Number=SeqID_41705
MPKRRLGKGKGYSLREGGRLPARGLVDDVPPNRRVQVRLPRPPTEEEEKECSVSREEEQTAWSYTLIQGLLAHQRVLVQDLSYLFQCNAKLGDFKRGSSASPNLRPRPREKVSASPTPSLGLSLGLGRSHVLARPQPRPQEKSPPRPTWASDRLRYRGYIITLLLASCLRLRRNNTGVPSKVTPATGNDGSPRAPMTSDCSQPPTEARKRQQHPCRTASCASTGLKDMDIGRMQGRGADETGSM

SEQ ID NO: 83485 - protein, 128 aa, Zea mays
  Coding DNA Sequence Number=SeqID_41706
GWTIQARSVDRPWRNLAKQVADHAKHILRICNEKLPFGKGLTAFEVKELREALEFVAEGLDQDSLFCQEELDATVKEEQLEHDEKVALERIESPLPSRDSDCFLSLEEHIEKFWGVDYNSDQMPSYSD

SEQ ID NO: 83486 - protein, 104 aa, Zea mays
  Coding DNA Sequence Number=SeqID_41707
MGRLIERLRQNRSRVDWGVLAGMSKSTEIIDKVIILMQDHAKHILRICNEKLPFGEGLTAFEVKELREALEFAAEGLDQDSLFAKRNWMQLLRRNNWSMTRRWL

SEQ ID NO: 83487 - protein, 130 aa, Zea mays
  Coding DNA Sequence Number=SeqID_41708
  Gene Ontology: Mol. function=translation initiation factor activity; Cellular component=signalosome complex; Biological process =regulation of translational initiation
  Homolog annotation: Hit_ID=Q8GVI0; Match level="QueryCoverage=55%, HitCoverage=16%, E-value=3e-30, Identity=86%"; Hit description =Putative eIF3e
MEKYLDGEIKAQKKALSAQGLKSGGIVQQHAYRLFLLKTNAHHLIRYLATAVVVNKRRRNMLKELIKVIQQEHHSYKDPVTECLECLYVNYDFDGAQQKLIECEQGVLDKESLYLKTGGYKKLEWLSEGF

SEQ ID NO: 83488 - protein, 206 aa, Zea mays
  Coding DNA Sequence Number=SeqID_41709
  Gene Ontology: Mol. function=nucleic acid binding; Cellular component= intracellular
  Homolog annotation: Hit_ID=Q8GVI0; Match level="QueryCoverage=42%, HitCoverage=19%, E-value=6e-35, Identity=82%"; Hit description =Putative eIF3e
MALATTANSTRDNSRENKCGENENQGLFDFSCGILVVSMLESEFEERWANGEIPGWGNKGAEKRSKIDLDYYSTVEELVELGLEKLKQALSAQGLKSGGTVQQLFKIMYLNAIQTNAHHLIRYLATAVVVNKRRRNMLKELIKVIQQEHHSYKDPVTEFLECLYVNYDFDGAQQKLIECEQGVLDKESLYLKTGGYKKLEWLSEGF

SEQ ID NO: 83489 - protein, 90 aa, Zea mays
  Coding DNA Sequence Number=SeqID_41710
MAVGVSEALYAKAVSPDLVTGNRWGRLMCVGTECLAMSSSAFGNQTPQPNNCMSRGSLEDMVAGVTWPSILPPGWTVEWDPTSAEEEHEE

SEQ ID NO: 83490 - protein, 65 aa, Zea mays
  Coding DNA Sequence Number=SeqID_41711
MARHFVPTHINCPHRFPVSREGLTALAQILDGRLWCWIRGYLLSNSLLRHEDVLSVSDVAIYRMQ

SEQ ID NO: 83491 - protein, 90 aa, Zea mays
  Coding DNA Sequence Number=SeqID_41712
MLVDLCVVEDWRDTRLIVEDVHEVRCSRQVLWFGPQNHPALRMAGFAEFGPQNSAVEVPEGTGGGTRRDHGGCVKAKQLCVKDVVVGSKI

SEQ ID NO: 83492 - protein, 64 aa, Zea mays
  Coding DNA Sequence Number=SeqID_41713
MAEVKVMRARADGSGAVKGECWVLTDRSEQPGHGGVDRVAGVVEDWRDTRLIMEDVHEVRCSWQ

SEQ ID NO: 83493 - protein, 86 aa, Zea mays
  Coding DNA Sequence Number=SeqID_41714
  Gene Ontology: Mol. function=nucleotide binding; Cellular component =protein complex; Biological process=protein polymerization
  Homolog annotation: Hit_ID=Q6F2N1; Match level="QueryCoverage=72%, HitCoverage=13%, E-value=2e-23, Identity=84%"; Hit description =Putative cell division protein FtsZ
MLVHVQYPLGAWIKVIGVGGGGSNAVYRMIESSMKGVEFWIVNTDFQAMPMSPIELENRLQVGQELTRGLGAGADMVFVTITANAS

SEQ ID NO: 83494 - protein, 474 aa, Zea mays
  Coding DNA Sequence Number=SeqID_41715
  Gene Ontology: Mol. function=nucleotide binding; Cellular component =protein complex; Biological process=protein polymerization
  Homolog annotation: Hit_ID=Q6F2N1; Match level="QueryCoverage=88%, HitCoverage=89%, E-value=0.0, Identity=81%"; Hit description =Putative cell division protein FtsZ
  Pfam annotation: Domain name=Tubulin; Domain location=115-310; Score =320.6; E_value=2.7e-93; Accession=PF00091.15; Description =TubulinFtsZ family, GTPase domain
  Pfam annotation: Domain name=Tubulin_C; Domain location=312-432; Score=95.7; E_value=1.4e-25; Accession=PF03953.7; Description =TubulinFtsZ family, C-terminal domain
  Pfam module annotation: Pfam domain module=Tubulin::Tubulin_C; Domain location=115-310::312-432
  Subcellular localization annotation: CTP_CleavageSite=54; ConfidenceScore=5.53e-01
MAAQLLFSNASSCHCPLGISRINVGKTLLGESASFQRKKSFSGGSYRFSRFDCSANSRRAGPRRTKDTLYDLHPEISLLYGEDNGAATLSSKEQGIDTTAERLVDTSPSYRYNEPRIKVIGVGGGGSNAVNRMIESSMKGVEFWIVNTDFQAMRMSPIEPENRLQIGQELTRGLGAGGNPEIGMNAAKESQELVEQAVAGADMVFVTAGMGGGTGTGGAPIIAGIAKSMGILTVGIVTTPFSFEGRRRALQAQEGIASLRSNVDTLIVIPNDKLLTAVSPNTPVTEAFNLADDILRQGVRGISDIITVPGLVNVDFADVRSVMSDAGSSLMGIGTATGKTRARDAALNAIQSPLLDIGIERATGIVWNITGGNDLTLTEVNAAAEVIYDLVDPGANLIFGSVIDPSYTGQVSITLIATGFKRQEESESRSSQVWFLGLLVSKVEQMFLNRILICVQTSSPEYIGWAALLLRNLQ

SEQ ID NO: 83495 - protein, 138 aa, Zea mays
  Coding DNA Sequence Number=SeqID_41716
  Subcellular localization annotation: CTP_CleavageSite=63; ConfidenceScore=5.03e-01
MPKTTHMLQQLRNRAHHVLGSGGRSDLAAGTKFSPRVLSRPLRHGDRPSHHRRRDNSQLPSPRSYTIVKGKCALGPFLSILVIGCKHKCLNVKICSWVNKVQITSKGREAPSCGDSSQTGLRKEKQEHRGIQVDHWIT

SEQ ID NO: 83496 - protein, 196 aa, Zea mays
  Coding DNA Sequence Number=SeqID_41717
MRLGVPFIAPRQLGAVESTSGSGEIASAAAAKDVVGSVAQLLKHAAAFAERIASGALTSEFAAERRRLEGRNECLRSQLTEAMRDKSAAENKNRNLTDKLSAAEAEKEELGRRGELQEPSRPSGRGRGLYPHRGGPNACIARGREELEVLPSIVMGLTSFALLITCEGAANALSHEGCRHFEVFDRSDEDFDCEIF

SEQ ID NO: 83497 - protein, 83 aa, Zea mays
  Coding DNA Sequence Number=SeqID_41718
MTKVDALSKIVENMNNMGLHLYLQLDRRTFGRRRPPTVRFRQSYKRSTPPQAKGVPFHPHGGTVIPGGHSTNRSYGEVLRKKA

SEQ ID NO: 83498 - protein, 112 aa, Zea mays
  Coding DNA Sequence Number=SeqID_41719
MAGIPTTLHGSNQSDRTGMRCSLGFASRTNAVHLPKSEHYVTTPIDSPQAKPTTPPGSSNYSAKGVPFHPHGCTVIPGGHFRTGPYEEVLEKKRPEPPRVSQYHHWDNIIVS

SEQ ID NO: 83499 - protein, 160 aa, Zea mays
  Coding DNA Sequence Number=SeqID_41720
MDARSSLEVPLHGRAPYSPAASLKLVLWTPEQYMCPCLAGPLFAIVGLRVTLIVIGVKRQWAWPSISLSTSSILLIEDGTSFVTYFRFEQHGHNIADAKKDDPLGLQHLALCPTRYWPNDNAVECSNDRNYLCRNRFNKYFDITWVEQTWWADNYDCVVV

SEQ ID NO: 83500 - protein, 87 aa, Zea mays
  Coding DNA Sequence Number=SeqID_41721
MEVLKSGLGLGTGDVLPRLIKDYRECRLDDRGPFNWSHASSWHTLESLFFSRVTSHLIVIGVKRRWARPSISLSTSSILLIEDGHLS

SEQ ID NO: 83501 - protein, 56 aa, Zea mays
  Coding DNA Sequence Number=SeqID_41722
MARVACTLRGKRLDGGVSVLSVTSHLIVIGVKRRWARPSISLSTSSILLIKDGHLS

SEQ ID NO: 83502 - protein, 71 aa, Zea mays
  Coding DNA Sequence Number=SeqID_41723
MTRVACTLRGKSLDGGVYVLSVGVNPQTLESLFFSRVTSHLIVIGVKRRWARPSISLSTSSILLIEDGHLS

SEQ ID NO: 83503 - protein, 150 aa, Zea mays
  Coding DNA Sequence Number=SeqID_41724
  Gene Ontology: Mol. function=catalytic activity; Biological process =trehalose biosynthetic process
  Homolog annotation: Hit_ID=Q6KAF3; Match level="QueryCoverage=71%, HitCoverage=43%, E-value=1e-29, Identity=79%"; Hit description =Putative alpha,alpha-trehalose-phosphate synthase
  Subcellular localization annotation: CTP_CleavageSite=35; ConfidenceScore=5.33e-01
MADSSALPSSNSFPSTAFTQPVSGLMRGTTVPNPTAQPVSGPEVLCPDEDLVWIHDYHLLALPTFLRKRFPLNRIPYIYTVCRQESTALGNDSPKQTVIVLSEFVGCSPSLSSAICVNPWSVESMVEAMNAVLRVPEAEQRLRHEKHYRF

SEQ ID NO: 83504 - protein, 344 aa, Zea mays
  Coding DNA Sequence Number=SeqID_41725
  Gene Ontology: Mol. function=catalytic activity; Biological process =trehalose biosynthetic process
  Homolog annotation: Hit_ID=Q6KAF3; Match level="QueryCoverage=59%, HitCoverage=14%, E-value=3e-23, Identity=74%"; Hit description =Putative alpha,alpha-trehalose-phosphate synthase
  Subcellular localization annotation: CTP_CleavageSite=12; ConfidenceScore=5.13e-01
MALRNPPPKPTRAGQGTHQIEPPERGGRRSTRERLGAATARRSVRRAGLGVGGGVEACRVSVGVAERADCLTCSVALLEKEARKGEAKGGAAAGEGGAGQRKRVDSYGRPLTEMPLRRAVISAQYFILQLFLVFSRDIKMLLHFKIGGLPFQRTLYHSFLSANRAFADRLTEVLSPNEDLVWIHDYHLLALLTFLRKRFPRAKGVRRPPHRGAVPDEDLVWIHDYHLLALPTFLRKRFPRAKRTLYHSFLSANRAFVDCLTEVLSPDEDLVWIHDYHLLALPTFLRKRFPRAKRTLYHSFLSANRAFVDRLTEVLSPDEDLVWIHDYHLLALPTFLCKRFPRAK

SEQ ID NO: 83505 - protein, 86 aa, Zea mays
  Coding DNA Sequence Number=SeqID_41726
  Subcellular localization annotation: CTP_CleavageSite=75; ConfidenceScore=5.12e-01
MVLAIVVLLGAVAIHVVVLLLQPRARHRAPLQMHLQVQVLVLLTVVPSVLSSGYSSDLSSMAGLVNGVHMVIFVSVSQGTKDSFYA

SEQ ID NO: 83506 - protein, 177 aa, Zea mays
  Coding DNA Sequence Number=SeqID_41727
  Homolog annotation: Hit_ID=Q9FH78; Match level="QueryCoverage=84%, HitCoverage=77%, E-value=1e-13, Identity=32%"; Hit description =Arabidopsis thaliana genomic DNA, chromosome 5, TAC clone:K9E15
  Pfam annotation: Domain name=Hin1; Domain location=18-152; Score =53.5; E_value=7.1e-13; Accession=PF07320.4; Description=Harpin -induced protein 1 (Hin1)
MVLAVVVLLGAVAVLVVVLLLQPRAPYVAVRAASLYALVYGQTGALDDVQVTVRVEARNGNAHSAAYFSRLAFAGATLAVLRAYPFRVPARGVLPLAYVARAQGAPLGDAGSVAMEAALRDGVVPFRVEGEARTRWKVAGIVGVDQWTCLACQLRFFWPNGTVLPFRCSSKSKFLFF

SEQ ID NO: 83507 - protein, 81 aa, Zea mays
  Coding DNA Sequence Number=SeqID_41728
MSIVHIILYEVALHTSYEEGDNLQMQINILNYIEGAVRTTRAAGLADQAQGVPGNILLDSVFRAKVADFGLARMLAQAGAP

SEQ ID NO: 83508 - protein, 1018 aa, Zea mays
  Coding DNA Sequence Number=SeqID_41729
  Gene Ontology: Mol. function=protein serine/threonine kinase activity; Cellular component=integral to membrane; Biological process=protein amino acid phosphorylation
  Homolog annotation: Hit_ID=Q5JKV7; Match level="QueryCoverage=98%, HitCoverage=98%, E-value=0.0, Identity=56%"; Hit description =Putative LRK1 protein
  Pfam annotation: Domain name=LRRNT_2; Domain location=36-76; Score =41.9; E_value=2.2e-09; Accession=PF08263.3; Description=Leucine rich repeat N-terminal domain
  Pfam annotation: Domain name=LRR_1; Domain location=104-126; Score =12.6; E_value=1.2; Accession=PF00560.23; Description=Leucine Rich Repeat
  Pfam annotation: Domain name=LRR_1; Domain location=128-151; Score =16.6; E_value=0.088; Accession=PF00560.23; Description=Leucine Rich Repeat
  Pfam annotation: Domain name=LRR_1; Domain location=154-176; Score =14.2; E_value=0.48; Accession=PF00560.23; Description=Leucine Rich Repeat
  Pfam annotation: Domain name=LRR_1; Domain location=178-200; Score =10.8; E_value=2.7; Accession=PF00560.23; Description=Leucine Rich Repeat
  Pfam annotation: Domain name=LRR_1; Domain location=202-225; Score =9.3; E_value=5.1; Accession=PF00560.23; Description=Leucine Rich Repeat
  Pfam annotation: Domain name=LRR_1; Domain location=227-249; Score =3.0; E_value=77; Accession=PF00560.23; Description=Leucine Rich Repeat
  Pfam annotation: Domain name=LRR_1; Domain location=251-273; Score =19.3; E_value=0.014; Accession=PF00560.23; Description=Leucine Rich Repeat
  Pfam annotation: Domain name=LRR_1; Domain location=275-298; Score =8.5; E_value=7.3; Accession=PF00560.23; Description=Leucine Rich Repeat
  Pfam annotation: Domain name=LRR_1; Domain location=299-322; Score =14.9; E_value=0.3; Accession=PF00560.23; Description=Leucine Rich Repeat
  Pfam annotation: Domain name=LRR_1; Domain location=324-346; Score =13.7; E_value=0.65; Accession=PF00560.23; Description=Leucine Rich Repeat
  Pfam annotation: Domain name=LRR_1; Domain location=348-370; Score =7.6; E_value=11; Accession=PF00560.23; Description=Leucine Rich Repeat
  Pfam annotation: Domain name=LRR_1; Domain location=372-391; Score =2.1; E_value=1.2e+02; Accession=PF00560.23; Description=Leucine Rich Repeat
  Pfam annotation: Domain name=LRR_1; Domain location=396-418; Score =10.0; E_value=3.9; Accession=PF00560.23; Description=Leucine Rich Repeat
  Pfam annotation: Domain name=LRR_1; Domain location=420-442; Score =9.6; E_value=4.5; Accession=PF00560.23; Description=Leucine Rich Repeat
  Pfam annotation: Domain name=LRR_1; Domain location=444-463; Score =3.1; E_value=74; Accession=PF00560.23; Description=Leucine Rich Repeat
  Pfam annotation: Domain name=LRR_1; Domain location=466-485; Score =11.3; E_value=2.2; Accession=PF00560.23; Description=Leucine Rich Repeat
  Pfam annotation: Domain name=LRR_1; Domain location=487-510; Score =6.9; E_value=15; Accession=PF00560.23; Description=Leucine Rich Repeat
  Pfam annotation: Domain name=LRR_1; Domain location=512-534; Score =16.5; E_value=0.096; Accession=PF00560.23; Description=Leucine Rich Repeat
  Pfam annotation: Domain name=LRR_1; Domain location=536-558; Score =13.3; E_value=0.89; Accession=PF00560.23; Description=Leucine Rich Repeat
  Pfam annotation: Domain name=LRR_1; Domain location=560-582; Score =14.8; E_value=0.32; Accession=PF00560.23; Description=Leucine Rich Repeat
  Pfam annotation: Domain name=LRR_1; Domain location=583-602; Score =13.9; E_value=0.6; Accession=PF00560.23; Description=Leucine Rich Repeat
  Pfam annotation: Domain name=LRR_1; Domain location=80-102; Score =1.0; E_value=1.9e+02; Accession=PF00560.23; Description=Leucine Rich Repeat
  Pfam annotation: Domain name=Pkinase; Domain location=708-964; Score =48.7; E_value=1.8e-11; Accession=PF00069.15; Description=Protein kinase domain
  Pfam annotation: Domain name=Pkinase_Tyr; Domain location=708-964; Score=2.3; E_value=1.3e-12; Accession=PF07714.7; Description=Protein tyrosine kinase
  Pfam module annotation: Pfam domain module=LRRNT_2::LRR_1::LRR_1::LRR_ 1::LRR_1::LRR_1::LRR_1::LRR_1::LRR_1::LRR_1::LRR_1::LRR_1::LRR_1: LRR_
  Pfam module annotation: Pfam domain module=Pkinase_Tyr; Domain location=36-76::104-126::128-151::154-176::178-200::202-225::227 -249::251-273::275-298::299-322::324-346::348-370::372-391::396 -418::420-442::444-463::...
  Pfam module annotation: Domain location=466-485::487-510::512 -534::536-558::560-582::583-602::80-102::708-964::708-964
MAPPRRACPCARACFVLLLALLPCCRVRRAGAQSQPADDKHLLLRIKSAWGDPPALAVWNASSPGAPCAWTFVGCDTAGRVTNLTLGSAGVAGPFPDAVGGLSALTHLDVSNNSISGAFPTALYRCASLQYLDLSQNKLTGELPVDIGRRLGANLSTLVLSNNQFDGSIPASLSSLSYLQHLTLDTNRFVGTVPPGLGSLTRLQTLWLAANRFVPAQLPASFKNLTSIVSLWASQCNLTGGFPSYVLEMEELEVLDLSNNMLTGSIPAGVWSLKNLQQLFLYDNNFSGDVVINDFAATSLTHIDLSENYKLTGPIPEAFGLLKNLTQLYLFSNNFSGEIPASIGPLPSLSIFRFGNNRFTGALPPELGKYSGLLIVEADYNELTGAIPGELCAGGKFRYLTAMNNKLTGSIPAGLANCNTLKTLALDNNQLSGDVPEALWTATLLNYVTLPGNQLSGSLPATMASNLTTLDMGNNRFSGNIPATAVQLRKFTAENNQFSGQIPASIADGMPRLLTLNLSGNRLSGDIPVSVTKLSDLTQLDMSRNQLIGEIPAELGAMPVLSVLDLSSNELSGAIPPALANLRLTSLNLSSNQLSGQVPAGLATGAYDKSFLDNPGVCTAAAGAGYLAGVRSCAAGSQDGGYSGGVSHALRTGLLVAGAALLLIAAAIAFFVARDIRKRRRVAARGHWKMTPFVVDLGFGEESILRGLTEANIVGRGGSGRVYRVTFTNRLNGAAGAGCCAASPAPRPKLLVYDYMDNGSLYKWLHGDALAAGGHPMATRARSARRTPLDWPTRLKVAVGAAQGLCYMHHECVPPIVHRDVKTSNILLDSEFRAKVADFGLARMLAQAGAPETMSAVAGSFGYMAPECAYTKKVNEKVDVYSYGVVLLELTTGKEPNDGGEHGSLVAWARHHYLSGGSIPDATDKSIKYAGYSDEIEVVFKLGVLCTGEMPSSRPTMDDVLQVLLKCSEQTQHKGKTERVPEYEEAPLLQPQRGSRRKQPSNGTGIDIESKSDFDSIV

SEQ ID NO: 83509 - protein, 127 aa, Zea mays
  Coding DNA Sequence Number=SeqID_41730
  Gene Ontology: Mol. function=protein serine/threonine kinase activity; Biological process=protein amino acid phosphorylation
MNPQLADLLLRLLCKGAFLVAFSPYDSDNLIQGIASRCRLRLSILGLLVMRGQSLNSSVDVGLAAGRGMMSAKKYNNKASSDSPQLKLWDVSVSGSVRPPTSGMYDWTGREDDHTGYGPVQRLQYGE

SEQ ID NO: 83510 - protein, 265 aa, Zea mays
  Coding DNA Sequence Number=SeqID_41731
  Gene Ontology: Mol. function=protein serine/threonine kinase activity; Biological process=protein amino acid phosphorylation
  Homolog annotation: Hit_ID=Q9M1T5; Match level="QueryCoverage=33%, HitCoverage=23%, E-value=1e-32, Identity=71%"; Hit description =Serine/threonine-protein kinase-like protein
MVILMNMLAIDQSGVDEMASSIGSLMRQESATKVESQDDDDMLWRSPGTPVFTAPECCQGSAYHGRASDTWAVGVTLYCMVSGHYPFLGDTLQETYDKIANDPVQIPGDMNPQLADLLLRLLCKGAFLVAFSPYDSDNLVFAKFLSMTLSVLMDVLAPSFHVLDLQIQGIASRCRLRLSILGLLVMRGQSLNSSVDVGLAAGRGMMSAKKYNNKASSDSPQEREKKEGKINDKTVYGCAVFELGAAEALGRQCQWIGAAANLWDV

SEQ ID NO: 83511 - protein, 561 aa, Zea mays
  Coding DNA Sequence Number=SeqID_41732
  Gene Ontology: Mol. function=cysteine-type peptidase activity; Biological process=proteolysis
  Homolog annotation: Hit_ID=Q53MK8; Match level="QueryCoverage=48%, HitCoverage=27%, E-value=2e-21, Identity=30%"; Hit description=Ulp1 protease family, C-terminal catalytic domain, putative
MPKSDDEKDTEFVHAGDGSGDDNVGIVGGDENKGITKTRAIRCSPGKFIKLVNSLSDELKSEVVAKGFGGLLRFKPHLLSRKLLSWLMRKLNPETMKLEIGGGKEIQITEHSVWCVLELPNVGSDPPTMSDADARALRDELGVQICGKSYRRISGINISVITDRLQKRTLNGELGLRAFFIAAFQCLLFSNTDTRIRIDDVKYTQDIQNIGNKNWCKAVVDRLSIAARLYRKDFAEKGINAPISGCEIFVAMLYVDNLQHGLDTSPFSIPRCAFLDSKMIDAIANMDLRGDVLPGTTEFGHLRLRSITDTCYGVPIGALAILHAPVPAPAPVAVPNPTAAPNPVAAAFVPVATTAPTGTSADKAVKYSTISRDLMAKAHHECYTGIQKLIADAIVEKRAAKERRRKVKNDPRAGAGAGTSSIAPEDQSRGGDGEEIIRSPVAIDPRAGADLDDSLDFTRTPSCGDDIDLEEGNLNRTPPDLRGSTRSIDDILEMIYSPEHFASIDGESPPNSQPTRAPRIAVRKRKASSNPPGNDQPPVGPPETEEEPLSRDTGMQHPTAQ

SEQ ID NO: 83512 - protein, 577 aa, Zea mays
  Coding DNA Sequence Number=SeqID_41733
  Pfam annotation: Domain name=TolA; Domain location=8-337; Score= -126.9; E_value=0.0056; Accession=PF06519.2; Description=TolA protein
HLLIYVGQPRSIDDILEMIYSPEHFASIDGESPPNSQPTRAPRIAVRKRKASSNPPGNDQPPVGPPETEEEPLSRDTGMQHPTAQKAEAEKKKAEIEMKNAEAEEAEKRKAEAEQADKKKAEEAENKRKAEAEVAEIKRKAAAEEAEKKKEVEAENKRKAEAEVAEMKRKAAAEEAEKKKEEEAEDKRKAEAEKAEIKRKAEAEEAEIKRKAEAEEAEIKRMAAAEEVVKKKADAEKKVDAEEKRIQVAIQKQLKDNIKALKKPVPAAKLKKMFQLQMSKEYAEQRPTEAKAEIDSLEKSIDGQAGPSSSFDDIQFPAESDDDINNLTQPIRLSQDEVSVGQADFSEFQRMIFKRLGDRVLKKPREYISPFKIPRNRPEIPLAKAVALRRKIASDPELKRRILLEFGLLVGLTGEEILTSFSNDTLGESGIIDFFVHCMRHDDIVHKVDSCGYRVFLTTGFYVFVPIKDGAHYFVYCFNFIHKRIDVLDSNDYFLNCSNQEERHKAVFAKIPIIDAAFQKVSNLKLPRFKGPIYRCELLRYEIFHPLNQAEIPGSLDKFRIGGRPLPIEWDSSQSNN

SEQ ID NO: 83513 - protein, 136 aa, Zea mays
  Coding DNA Sequence Number=SeqID_41734
MEVGCELASCQGGEWDPIAAYEKQAPLHWDADGWDFAVASESDGDLTDGDDFQFLVDRELDSDTSTEWSWTYDGESSDVESLDNDDDPMSGHWMGMVSSFDEDDENNDSSSDYDSSDEDIDDSGDDDGDDDGGASQ

SEQ ID NO: 83514 - protein, 125 aa, Zea mays
  Coding DNA Sequence Number=SeqID_41735
MTFDSSLLLEDRVNVDPVLDFNVLEWSSATFPFIATQKKLWRLALPMSTSPSDSSASFVSHSSSREPTPEWDPIAAYEKQAPLHWDADGWDFAVASESDGDLTDGDDLQFLVDGQLDSDTNTEWS

SEQ ID NO: 83515 - protein, 184 aa, Zea mays
  Coding DNA Sequence Number=SeqID_41736
  Gene Ontology: Mol. function=zinc ion binding; Cellular component =nucleus
MVFAAVREVHVEMEPTAEEQALPGVHVAVEDLRLNHAQDIAMGFHQWRRTEKIEGGESQEGADTTQNMNDTDKNNSEREESDLALEKESATFTSQKQHLEELSDAKETFIGGPEAEAKSNNTKDSDNPIAKVGSSVASDKMRDGCNANAIPCPATSNHTTEHSSIASQEASPASTKDTAIPEQV

SEQ ID NO: 83516 - protein, 239 aa, Zea mays
  Coding DNA Sequence Number=SeqID_41737
  Gene Ontology: Mol. function=zinc ion binding; Cellular component =nucleus
MARAEVGGEDRDGVGGATDAEFLAVKLYFLRYAYDPPSDLKDLASTFSPCAGGESQEGADTTQNMNDTDKNNSEREESDLALEKESATFTSQKQHLEELSDAKETFIGGPEVEAKSNSTKDSDNPIAKVGSSVASDKMRDGCNANAIPCPATSNHTTEPSSVASQEASPASTKDTAIPEQVERPSSEELLADVSLPQGKVEPKKTEPAPAASSNIQQHGCKQAGNGNTGTSFNLIHYFS

SEQ ID NO: 83517 - protein, 260 aa, Zea mays
  Coding DNA Sequence Number=SeqID_41738
  Gene Ontology: Mol. function=zinc ion binding; Cellular component =nucleus
MEPTAEEQALPVDARETSSVDFEGPEDLFSGRGLNHAQDIAMGFHQWRRTEKIEATDAEFLAVKLYFLRYAYDPPSGESQEGADTTQNMNDTDKNNSEREESDLALEKESATFTSQKQHLEELSDAKETFIGGPEVEAKSNSTKDSDNPIAKVGSSVASDKMRDGCNANAIPCPATSNHTTEPSSVASQEASPASTKDTAIPEQVERPSSEELLADVSLPQGKVEPKKTEPAPAASSNIQQHGCKQAGNGNTAAAEAVAC

SEQ ID NO: 83518 - protein, 652 aa, Zea mays
  Coding DNA Sequence Number=SeqID_41739
  Gene Ontology: Mol. function=zinc ion binding; Cellular component =nucleus; Biological process=regulation of transcription, DNA -dependent
  Homolog annotation: Hit_ID=Q53K34; Match level="QueryCoverage=77%, HitCoverage=61%, E-value=8e-84, Identity=39%"; Hit description=Myb -like DNA-binding domain, putative
  Pfam annotation: Domain name=Myb_DNA-binding; Domain location=32-78; Score=49.9; E_value=8.4e-12; Accession=PF00249.21; Description=Myb -like DNA-binding domain
MTNCYNEEKFDEGMSKSDFILMESADVPGSGGSNWTDHETLLLLEALEIFKGKEWHEIAEHVATKTKEQCMLHFLQMPISEPFLDGDDFNETPQKITKQDSAETGPSDVPDKMDVDGNAEGKESTDEKAYKKADSSSAETRTKLADQNISAKEDTMKLGDDDLVASIVDEPNKSSLVDPAHKKNSANADVSGEHPSNFITNILRSTFEAVDHFLGKEDMGSFAEAGNPVMALIHQVTSKIRLPLSGGESQEGADTTQNVNDTDKNNSEREDSDLALEKESATFTSQKQHLEELSDAKETFIGGPEAEAKSNSTKDSDNPIAKVGSSVASDKMRDGCNANAIPCPATSNHTTEPSSVASQEASPASTKDTAIPEQVERPSSEELLADVSLPQGKVEPKKTEPAPAASSSIQQHGCKQAGNGNTEPKSKENAAADDDPITRLQRAAGTAISAAAVKAKFLVEQEEGYIRQLAALVIEKQKMETKMSFLTEVGNLQRLPEQSSTGLRLLAHRFLVEVLRKFEIQIHQLTLNAMAALAKSSSLAECGLCRTDGFWAKLYLAGCRRWGINWCGAQPSLWTCSDGMRSPFMREVESEAVKIVGKYAAKTEMLKSWDIRGSNVRLNRVFELNSLPYGPYPEGNSTDVGDDRGKQAKPPA

SEQ ID NO: 83519 - protein, 167 aa, Zea mays
  Coding DNA Sequence Number=SeqID_41740
MRATNREMVKGFTRSTCAGEFLNSGERDLASPVTRAPGSSLRKAHGFTRKLSEGLDQTEEDWRGAGHGGCSRAALAGCGEVARVNGWLGRVRRSTEEVTGKATERWGGFYRRGRGRGVGSTVWRDGGATGAARRTRGALLLPVFFALLSGQAYESCPTACGRSLPCT

SEQ ID NO: 83520 - protein, 150 aa, Zea mays
  Coding DNA Sequence Number=SeqID_41741
NCEGSFAYRIREGGIAITGPSDLRSRLPGGGATSHYGEALPESRYSDDPEPRSLPCKSANSHQDGPNRGGNVFILCGSINGYGSAGSYMPKSPDRVMDSDEVRPEIPRDRGDQVDEGGGSANTVPHDGETTVAAEQGKETAVGGLAAWSL

SEQ ID NO: 83521 - protein, 228 aa, Zea mays
  Coding DNA Sequence Number=SeqID_41742
MDGTDLPTEMLHKFNLSRMREIERPRAQHTVIHLEPLIMRLTARRLSFLTQLPGGGAASHYGEASPESRYSDDPEPRSLPRKVLHVADIKARRPQLHSRKLHEDLRASLMLSIRSANEERPWRGGLHGDVDPIEDSSHLPRLTMIFFVGTRRSSQTRSRIRTVAHHGPTRGGSVFILCGSINGYGSAGSYMPKSPDRVMDSDEVRPEIPRDRLDMPKGKGKASALIPR

SEQ ID NO: 83522 - protein, 298 aa, Zea mays
  Coding DNA Sequence Number=SeqID_41743
  Gene Ontology: Mol. function=nucleic acid binding
MAPGIRFSKTVRAGPQLEEQPSKGFSLQRQMATIAAEEDMASAAHDSTGDAEGNGAPRRPRVATKGKHLDRMTKVMQRRLPIAVEEGKKRPHEPVQAAKFASEAGIIIQETMPILTHWKDYKDDQKYYNNFVSQLNKYFNGVPANEIRTTSLVSYMTDEQWRALVAKWSDPKNMEISEKNKQNRSKVKFHQSTGSRCYVAHLHAYKQKRNREEPSLDQTEELDAVDAFKTCHTNSKRGLSEPAREALSDMEALRAEPVAEGEMPASSVQLVSKVLSQSSSHQFLKSVGIKTPASSKSS

SEQ ID NO: 83523 - protein, 144 aa, Zea mays
  Coding DNA Sequence Number=SeqID_41744
MPASFAGRRARELHSVILGSSSPILSHMEALRAEPVAEGEMSASSVHLVSKVLSQSSSHQFLKSVGIKTSASSSNQSELREQLAAEATTAVQGELDQLRKKCEEAEEQQARTQRELEEYKKITEKNSKEMEETNVLIKKLLSLH

SEQ ID NO: 83524 - protein, 134 aa, Zea mays
  Coding DNA Sequence Number=SeqID_41745
MQLVDDLKNDGLNQWMLAKRARILTVEGSSSTLGVDYTFGEGLLQESGSSRRLGRSPRGLGQSPRGLGQLSPEDISPARGLGNSIPVSVPPVDDPAGLWPTNSYFRANSASVRADTATPGFSSSKSGRGVPLTK

SEQ ID NO: 83525 - protein, 58 aa, Zea mays
  Coding DNA Sequence Number=SeqID_41746
MARDTTCRILLLFTRPRDDDRASDVVPNHKMQLVDDLKNDGLNQWMLAKRAPHPANTI

SEQ ID NO: 83526 - protein, 124 aa, Zea mays
  Coding DNA Sequence Number=SeqID_41747
MAIRKTRGRLQRTMGAALEGSPRAHWTRGAPAPWEAPWTSRSRGARGLSWAPALGENGGQVGLPRGKPLVPGPATGSRKGAPRKLEPSLHGWGAGMNGVMGVSCALGKKAVLHGRDGWEKKSGG

SEQ ID NO: 83527 - protein, 83 aa, Zea mays
  Coding DNA Sequence Number=SeqID_41748
MAPPTARALLWSSAREEIPPMPHPSRVVITPRASLVGKEPRLRACMSTFAVGEQEVVDVSRGWFVDGINRLLKYFVIKQCVSR

SEQ ID NO: 83528 - protein, 542 aa, Zea mays
  Coding DNA Sequence Number=SeqID_41749
  Homolog annotation: Hit_ID=Q6QP51; Match level="QueryCoverage=9%, HitCoverage=22%, E-value=2e-12, Identity=75%"; Hit description =Putative growth-regulating factor 1
MQEVELRLSSPSAPARMMKILEAEGEAVAAVRLASPHHRTGAVADGVFTNKLQVRVTAQRLQALLHFRPNQRVKERTAMQVACNRTKGAHPFDFDASSMGAQAHTSCNRRAGYYVRETAPPLAPVPRLLDYGTGAATRGNPAHGPIVPTEHIDHGSVSRGRRRDGRYGQKWAGSNGGGRQAEAAIKSSAGTRTGKGDTPKGIFLREGSGLRALLLIRGSKVGPSEGFNSCLRALRLRAHYWSEVRRLAPRKGSTAASGHSGSAPTTDQGSDSVTESHQREASSPRTLSNGTGSGKSPAGSGVAHANPAPAKPLTASTYQPENLEPDYAPGLRPVRMREQPDRPKHHETRYDLGGVKPLLRGLGGYTRRLVTPISTKLQRPDGRDSGQGSVHSRDTISPRPSLASGKGSRPRRIHVSPEENSATCPASTAVPLDRVRLTAAKFSLERHRKLRLARPRSSGSTSTPDDGLRLDRPQGSHSASTSDDGLRLARPQGSDSASTSDDGLRLARPPGPDSASTSEESPPRPTPGSDRPRHRGPSLPYP

SEQ ID NO: 83529 - protein, 542 aa, Zea mays
  Coding DNA Sequence Number=SeqID_41750
  Homolog annotation: Hit_ID=Q6QP51; Match level="QueryCoverage=9%, HitCoverage=22%, E-value=2e-12, Identity=75%"; Hit description =Putative growth-regulating factor 1
MQEVELRLSSPSAPARMMKILEAEGEAVAAVRLASPHHRTGAVADGVFTNKLQVRVTAQRLQALLHFRPNQRVKERTAMQVACNRTKGAHPFDFDASSMGAQAHTSCNRRAGYYVRETAPPLAPVPRLLDYGTGAATRGNPAHGPIVPTEHIDHGSVSRGRRRDGRYGQKWAGSNGGGRQAEAAIKSSAGTRTGKGDTPKGIFLREGSGLRALLLIRGSKVGPSEGFNSCLRALRLRAHYWSEVRRLAPRKGSTAASGHSGSAPTTDQGSDSVTESHQREASSPRTLSNGTGSGKSPAGSGVAHANPAPAKPLTASTYQPENLEPDYAPGLRPVRMREQPDRPKHHETRYDLGGVKPLLRGLGGYTRRLVTPISTKLQRPDGRDSGQGSVHSRDTISPRPSLASGKGSRPRRIHVSPEENSATCPASTAVPLDRVRLTAAKFSLERHRKLRLARPQSSGSTSTPDDGLRLARPQGSHSASTSDDGLRLARPQGSDSASTSDDGLRLARPPGPDSASTSEESPPRPTPGSDRPRHRGPSLPYP

SEQ ID NO: 83530 - protein, 173 aa, Zea mays
  Coding DNA Sequence Number=SeqID_41751
  Subcellular localization annotation: CTP_CleavageSite=48; ConfidenceScore=5.53e-01
MPVVLLSPFSSLTRFFHFSARAAAPPYSPPPRRPPYARRRGRAVRRLPAAEAAPPARRLPLPRPCAVPAAPPASAAVCCAPCAVHRARRVPCGRALRGRVPCAVRRARRVPCGRALRGRVPCAICPPPHRGRPRRTRSLVATPPRRRISKPPRAGEVLPKFSVARHLLGDGGP

SEQ ID NO: 83531 - protein, 107 aa, Zea mays
  Coding DNA Sequence Number=SeqID_41752
  Gene Ontology: Mol. function=DNA binding; Cellular component=nucleus; Biological process=regulation of transcription, DNA-dependent
  Homolog annotation: Hit_ID=Q0PJJ0; Match level="QueryCoverage=46%, HitCoverage=18%, E-value=3e-12, Identity=68%"; Hit description=MYB transcription factor MYB118
MDRKPPERFRRRHLGHDGSVAASTSRVRSHEKRRDHKPLKRFRRRLIIKNGKWFGRDWKKIEEHVGTKTTVQIRSHAQKYFLKVQKLGLAAGLPPMYPRRHFAMQQQ

SEQ ID NO: 83532 - protein, 102 aa, Zea mays
  Coding DNA Sequence Number=SeqID_41753
  Gene Ontology: Mol. function=DNA binding; Cellular component=nucleus; Biological process=regulation of transcription, DNA-dependent
  Homolog annotation: Hit_ID=Q0PJJ0; Match level="QueryCoverage=48%, HitCoverage=18%, E-value=3e-12, Identity=68%"; Hit description=MYB transcription factor MYB118
MDRKPPERFRRRFISSMMHLLTVSSSSDGHTPDCFQIAFTVLISTCKKFGRDWKKIEEHVGTKTTVQIRSHAQKYFLKVQKLGLAAGLPPMYPRRHFAMQQQ

SEQ ID NO: 83533 - protein, 620 aa, Zea mays
  Coding DNA Sequence Number=SeqID_41754
  Homolog annotation: Hit_ID=Q1SPJ4; Match level="QueryCoverage=26%, HitCoverage=11%, E-value=1e-28, Identity=42%"; Hit description =Thiolase
  Pfam annotation: Domain name=WD40; Domain location=272-308; Score =1.7; E_value=23; Accession=PF00400.22; Description=WD domain, G-beta repeat
  Pfam annotation: Domain name=WD40; Domain location=316-356; Score =2.2; E_value=20; Accession=PF00400.22; Description=WD domain, G-beta repeat
  Pfam annotation: Domain name=WD40; Domain location=360-398; Score =24.2; E_value=0.00048; Accession=PF00400.22; Description=WD domain, G-beta repeat
  Pfam module annotation: Pfam domain module=WD40::WD40::WD40; Domain location=272-308::316-356::360-398
MSTRAQVATRARNTTRRVHNSTRALDAITKKQMCGIEVLVLRNALSMLGGLPHEEVELDGDVYITGNGSLVLLSGASLTCEKYGCVISANFLGEVRLSRGVRVTAGRVSLVATNITVADTVVVNTSALAGDPPDQTSGVPTGTHGNGGEHGGRGASCFVKQGQTQEDSWGGDAYAWSDLEHPWSYGSKGGSTRVEKDYGGAGGGIVWLFAEDLVMNGIVLANGGDSNEKGGGGSGGSIFIRAASIDLRCGNASLVNQAEFGKQLPIGEDQQYKLVATWSRHEEKVNMLYLFGEYVLSADAKGNVFMWAFRGAEPNIEPVGSISLGDKFTPTCIMHPDTYLNKVIVGSEEGFLQLWNISTKKKLYDFNGWNSPVRCCVSSPVLDVVAVGCSDGSVHVHNMIAKVAVVFHDVNVAHSSHQYVATGMPTKAALKISVETPVDCATVVVQGVLNADAESEKLWKKKDVIQKFGRDWKKIEEHVGTKTTVQIRSHAQKYFLKVQKLGLAAGLPPMYPRHHFAMQQQQQSSVAGGSSAAAMPLLHGRQPTCASVAMPGLAEPDAVAHHGSIGWSSPSVVVPAASSAASGSQFIGAPSLCDTSIDWAGGGGGSGSPSEAPAMGAVQD

SEQ ID NO: 83534 - protein, 515 aa, Zea mays
  Coding DNA Sequence Number=SeqID_41755
  Homolog annotation: Hit_ID=Q109R5; Match level="QueryCoverage=25%, HitCoverage=14%, E-value=2e-29, Identity=46%"; Hit description=Ulp1 protease family, C-terminal catalytic domain containing protein
  Pfam annotation: Domain name=Peptidase_C48; Domain location=268-486; Score=-1.9; E_value=0.00079; Accession=PF02902.9; Description=Ulp1 protease family, C-terminal catalytic domain
MTVLARTGLFCVLAVAGMQGLDLEWATGASVPGAAAAARVNADAQRQSAPPLFAAGNFAWRRISIPAAKTLVEKMTELVRAGSGGSRFIGAPSLSDTIIDWAGGGGGSGSASEAPAMGAVQDQQQIELPLSPEDVPFAQVYRFVGDMFDARRGRADPGGSPPAEAEGDGRHHSQDSPAGAAEPREQPVDAPVRACGKTRSALLTALRSLAEPEASFSLTLLFSGQTRALSALHICLKFCQEVIKKSVYHLLVQELMIPLKLVFRVYTTQRALDAICRKFLLEMRVTIIFCTQGDTALIDWIKEIPCEAKFNFLKRDGDVETKTDELYPIKDMSQISSAERRVLLYLDHDMVFIPINIREMHWYLAVINVRNMEIQVLDSLGKSSGRNDLINTIKGLQRQIDMVSQRKELKDHRWPDLRVASWPLREMEMKYAKQTDSSSCGLFLLNYIEYWTGDELSDNFTQEKLAAILLFSDINKRKGCPLYKYDKEVDAGSSSDVQILDSPTNPKKRKLLCVS

SEQ ID NO: 83535 - protein, 472 aa, Zea mays
  Coding DNA Sequence Number=SeqID_41756
  Gene Ontology: Mol. function=cysteine-type peptidase activity; Biological process=proteolysis
  Homolog annotation: Hit_ID=Q53MK8; Match level="QueryCoverage=51%, HitCoverage=26%, E-value=2e-23, Identity=29%"; Hit description=Ulp1 protease family, C-terminal catalytic domain, putative
MKHVDRPPNNPKRITIQSSQKCFSVDIPSAEQSNPCPEVGNPPNVDSQNLTNETVQLDSDEDDFMPALKKRNRLNVRCNPQDVIASINILNERQREAIRCKGFSNILDMTVDALCSRSHLQWLMDKLDPKDMTIRPGPGKELKITKDIVHLILGVPNHGGGKPLGIDEAVAASNLRAELGLAKDEFNVTFLQDRLRKGEDDDLTIKCFFLILFNRLLFPIASWGITYHEVLLTEEMRSFHEIDWCQLIFNDLCEAAKKWHNRITTKCLHDYIRMLHCCPSTAPQNKTGTPRIKFFDKNSIKALTKADKRKPECRTNIFDAPRPAPTPRPTFNIKLPSIKEMMPSKINDLPPRHRSKFTDILAAYDLEVDKSCIAIKDSIDKIIEKQYDIAYKFIELIDEVLRVESDNLENETDEPQHPGNSADSADIDDGFLRHDIRVAARGDIGERRDGYDCTRHERRSERLRPLPPNVER

SEQ ID NO: 83536 - protein, 309 aa, Zea mays
  Coding DNA Sequence Number=SeqID_41757
  Gene Ontology: Mol. function=cysteine-type peptidase activity; Biological process=proteolysis
  Homolog annotation: Hit_ID=Q53MK8; Match level="QueryCoverage=66%, HitCoverage=21%, E-value=1e-21, Identity=30%"; Hit description=Ulp1 protease family, C-terminal catalytic domain, putative
MKHVDRPPNNPKRITIQSSQKCFSVDIPSAEQSNPCPEVGNPPNVDSQNLTNETVQLDSDEDDFMPALKKRNRLNVRCNPQDVIASINILNERQREAIRCKGFSNILDMTVDALCSRSHLQWLMDKLDPKDMTIRPGPGKELKITKDIVHLILGVPNHGGGKPLGIDEAVAASNLRAELGLAKDEFNVTFLQDRLRKGEDDDLTIKCFFLILFNRLLFPIASWGITYHEVLLTEEMRSFHEIDWCQLIFNDLCEAAKKWHNRITTNVSTTIYGCSIVVLLLNIIILLCSVLLGSPAYSTALKIDWHNSH

SEQ ID NO: 83537 - protein, 114 aa, Zea mays
  Coding DNA Sequence Number=SeqID_41758
MQVACNYTKGAHPFNFDASSMEAQAHTSCNRRAGYYVRETAPPLAPVPRILDRGIGAATRGNPAHDPAVSTRHAGHGAGDTFWQAKRATLHLRHNDRVKKRDRERGYSERDPSP

SEQ ID NO: 83538 - protein, 333 aa, Zea mays
  Coding DNA Sequence Number=SeqID_41759
  Homolog annotation: Hit_ID=Q6QP51; Match level="QueryCoverage=29%, HitCoverage=40%, E-value=3e-22, Identity=57%"; Hit description =Putative growth-regulating factor 1
  Subcellular localization annotation: CTP_CleavageSite=22; ConfidenceScore=5.07e-01
MLQGPPPTTRGLGPTRHASWPRAEEAKPPRAVCVTAQRLQALLHFRPNQRVKGRTAMQAACNRTKGAHPFNFNASNMEAQAHMSCNRRAGYYMREIALPLAPVPRLLDCGTGAATRGNPAHGPTVPTEHIGHGSVSRWKRRDGRYGQKWAGSNGGGRQAEVAVKSSASSRPLLGQRENPLPRTCDTFGRQSGRRFTFAIMTASKKRAPSPPTDQRFEGWPLGRVRQPPQSSQAPRLLLIRGSNAGPSEEFDSRLRALGLRAHYWLAPEGFDSHLRARRARDDSGYVRYMAEAQATLPRKNPIGNVLARAAKNLLSLGAPECPVVHRTVSGAPG

SEQ ID NO: 83539 - protein, 48 aa, Zea mays
  Coding DNA Sequence Number=SeqID_41760
MNKNTRDTRFIPRFGHTTKVPYFLVEAPTKSRLELRKLNSPEVQLSCS

SEQ ID NO: 83540 - protein, 111 aa, Zea mays
  Coding DNA Sequence Number=SeqID_41761
  Subcellular localization annotation: CTP_CleavageSite=26; ConfidenceScore=5.01e-01
MNKNTRDTRFIPRFGHTTKVPYFLVEAPTKSRVSFNPNPPFADHKGKIPRLNFPWTPVEPLWTPVEPVWTPIELEVQLELRKLNSAEVQLSCSSRSSTQLKFNSAEKLSCS

SEQ ID NO: 83541 - protein, 116 aa, Zea mays
  Coding DNA Sequence Number=SeqID_41762
MAYLIARSTRGGGRPNSGEDDLGPPVKFCRVRGLGKLHKLLAKLTERMAQLGSDRRRLATVAEARKAWLVVAQRARGEFRRSLAWAGLVSARGENAIDLWKGAKIQISEFPPSALV

SEQ ID NO: 83542 - protein, 106 aa, Zea mays
  Coding DNA Sequence Number=SeqID_41763
MKLSKSSDPTELHRRPEIALAGLRSLAATRGPSTPVEFLAADEHLCLRTRIGRLRPSPTATRTSPEYMLIPEQGVVHEEDQEQAPETAIEDLPAAPAIEGKPRFYA

SEQ ID NO: 83543 - protein, 236 aa, Zea mays
  Coding DNA Sequence Number=SeqID_41764
  Gene Ontology: Mol. function=hydrolase activity, acting on glycosyl bonds; Biological process=L-arabinose metabolic process
  Homolog annotation: Hit_ID=Q2QY88; Match level="QueryCoverage=99%, HitCoverage=34%, E-value=3e-79, Identity=61%"; Hit description=Alpha- L-arabinofuranosidase C-terminus family protein, expressed
  Pfam annotation: Domain name=Alpha-L-AF_C; Domain location=28-219; Score=111.3; E_value=2.8e-30; Accession=PF06964.2; Description=Alpha- L-arabinofuranosidase C-terminus
VYTDSKTLFNMRSTFDRTSRSGPKAFVSEYAVWRSDAGRGSLLASLAEAAFLTGLEKNRWNPDAIVFNSWQHYGTPSYWMQTIFRESSGAMIHPVNISSRYSSSLAASAITWQDAENSFLRVKASSRVCRIASVLACAAKALFVSIGLVVNFGSDTVNLTVSTSGLGASVNALGSTATVLTSGNVMDENSFSNPNKVAPVKSQLSNAAEQMQVTLAPHSFTAFDLALAEPKLVAEI

SEQ ID NO: 83544 - protein, 261 aa, Zea mays
  Coding DNA Sequence Number=SeqID_41765
  Gene Ontology: Mol. function=hydrolase activity, acting on glycosyl bonds; Cellular component=nucleus; Biological process=L-arabinose metabolic process
  Homolog annotation: Hit_ID=Q2QY88; Match level="QueryCoverage=100%, HitCoverage=38%, E-value=1e-100, Identity=66%"; Hit description =Alpha-L-arabinofuranosidase C-terminus family protein, expressed
  Pfam annotation: Domain name=Alpha-L-AF_C; Domain location=93-261; Score=37.7; E_value=6.7e-12; Accession=PF06964.2; Description=Alpha -L-arabinofuranosidase C-terminus
MGHPEPFLVKHVAIGNEDCGKKFYRGNYLKFYNAIREAYPDIQMISNCDGSSRPLDHPADLYDFHVYTDSKTLFNMRSTFDRTSRSGPKAFVSEYAVWRSDAGRGSLLASLAEAAFLTGLEKNRWNPDAIVFNSWQHYGTPSYWMQTIFRESSGAMIHPVNISSRYSSSLAASAITWQDAENSFLRVKASSRVCRIASVLACAAKALFVSIGLVVNFGSDTVNLTVSTSGLGASVNALGSTATVLTSGNVMDENSFSNPNK

SEQ ID NO: 83545 - protein, 191 aa, Zea mays
  Coding DNA Sequence Number=SeqID_41766
  Gene Ontology: Mol. function=hydrolase activity, acting on glycosyl bonds; Cellular component=nucleus; Biological process=L-arabinose metabolic process
  Homolog annotation: Hit_ID=Q2QY88; Match level="QueryCoverage=96%, HitCoverage=41%, E-value=1e-79, Identity=84%"; Hit description=Alpha- L-arabinofuranosidase C-terminus family protein, expressed
MEVLCDDCPAGGVGVYNPGFWGMGHGFRTELISMLLDLKPRFLRFPGGCFVEGDWLRNAFRWRESIGPWEERPGHFGDVWHYWTDDGLGYYEFLQLAEDLGAAPIWVFNNAVFMNAEKDITVVGDPLLFIQDVLDSLEFARGSADSTWGSVRAAMGHPEPFLVKHVAIGNEDCGKKFYRGKLINYICICFL

SEQ ID NO: 83546 - protein, 531 aa, Zea mays
  Coding DNA Sequence Number=SeqID_41767
  Gene Ontology: Mol. function=hydrolase activity, acting on glycosyl bonds; Cellular component=nucleus; Biological process=L-arabinose metabolic process
  Homolog annotation: Hit_ID=Q2QY88; Match level="QueryCoverage=97%, HitCoverage=98%, E-value=0.0, Identity=72%"; Hit description=Alpha-L- arabinofuranosidase C-terminus family protein, expressed
  Pfam annotation: Domain name=Alpha-L-AF_C; Domain location=377-514; Score=73.1; E_value=9e-19; Accession=PF06964.2; Description=Alpha-L -arabinofuranosidase C-terminus
MDLKQAFSGTIFCLLLLFCVGCRCRTLEIEATQTAALKVDASPQLARKIPETLFGIFFEEINHAGAGGIWAELVSNRGTPAILEFCVPFETSLDALILKAAAGVDVQDDSSVFVATDRTSCFSRNIVALRMEVLCDDCPAGGVGVYNPGFWGMGHGFRTELISMLLDLKPRFLRFPGGCFVEGDWLRNAFRWRESIGPWEERPGHFGDVWHYWTDDGLGYYEFLQLAEDLGAAPIWVFNNAVFMNAEKDITVVGDPLLFIQDVLDSLEFARGSADSTWGSVRAAMGHPEPFLVKHVAIGNEDCGKKFYRGNYLKFYNAIREAYPDIQMISNCDGSSRPLDHPADLYDFHVYTDSKTLFNMRSTFDRTSRSGPKAFVSEYAVWRSDAGRGSLLASLAEAAFLTGLEKNRWNPDAIVFNSWQHYGTPSYWMQTIFRESSGAMIHPVVNFGSDTVNLTVSTSGLGASVNALGSTATVLTSGNVMDENSFSNPNKVAPVKSQLSNAAEQMQVTLAPHSFTAFDLALAEPKLVAEI

SEQ ID NO: 83547 - protein, 259 aa, Zea mays
  Coding DNA Sequence Number=SeqID_41768
MSWGHVACQKGGQAACPLHNKCGGRAAQSPYVTLRPLAYATDNKPCGSIRPSIEWGAEALRIEPRHTSIPDPCLGHGTSSPRTLLWVVRSSLGGVRTLSNGSGLLYFGGPGCAYRGPMPSGSDGVVSENATLTAPQDTPGAILRAAKARRQLFGGDLAFRGGVRLVLPLEVPLLGELWRWAVVSWDFLFFTNDDAGGVFACRGGLSGFLDAEHSSLSAAIDLGDSDLSPCECVKDEVPATSDHPYDLQVIGGGEMAEGH

SEQ ID NO: 83548 - protein, 178 aa, Zea mays
  Coding DNA Sequence Number=SeqID_41769
MANREANHLPQTTIHFGSLDFSFNCEGKTARALEARPPPSRNLSTTATADGGPRNDYTPVRVIWLKQCPPGLLRPRAPTWSRRPWVPSASPRTQHERRRLASPFEAEFSALYDAEATSYYGGSSSGPDAFPPQLCNATAMITALMALGHLPTSDDLEIIGVVAGGGDLIFDALARTQI

SEQ ID NO: 83549 - protein, 93 aa, Zea mays
  Coding DNA Sequence Number=SeqID_41770
MAGGIELAGAKERGLAGEEIWSQEIRSVSLPKPEANPRETLGDTGVSQPSPLKGISSRDSGQSPPRVKRRVRLIGNGFEGQEEGLGVITYQLP

SEQ ID NO: 83550 - protein, 109 aa, Zea mays
  Coding DNA Sequence Number=SeqID_41771
MAGGIELAGAKERGLAGEEIWSQEIWSVFLPKPEANPRETLGDTGVSQPSPLKGISSRDSGQSPPRVKRRVRRAGGGVGGDYVPASLGRQSGKLDLKNSSVSHVASSSE

SEQ ID NO: 83551 - protein, 47 aa, Zea mays
  Coding DNA Sequence Number=SeqID_41772
MENTSPLHVCQVQGTPIPFQVSEAHTIYYLNSTTIGCLELGVKFAQT

SEQ ID NO: 83552 - protein, 160 aa, Zea mays
  Coding DNA Sequence Number=SeqID_41773
MSWGTCLLKFWSLFVIDPRGLSLRSLWRSGRESFGRQVLLNLLPLLPWKTESLQGVNREVCQVQRTPIPFQVSEAHTNYYLNSTTIGCLELENGEEGEVTEEKTSPPLESQAETWLYFDICESEPDSPTNKGKPRCMQPLPCVFKYFSHTLSLVKCALSL

SEQ ID NO: 83553 - protein, 109 aa, Zea mays
  Coding DNA Sequence Number=SeqID_41774
MGARASPLWAENREEGEVTEEKTSPPLESQAETWLYFDICESEPDSPTNKGKPRLSFALRPCSGVILRKDDFYLQEYIFIGSMVGSYCKVPCDALFILRNTNNPKGGNT

SEQ ID NO: 83554 - protein, 60 aa, Zea mays
  Coding DNA Sequence Number=SeqID_41775
MASTCKNIFIESMVGSYCKVPFDALFILRNTNNPKGGSLLIKDYLNWPHDLEMGHDVFGD

SEQ ID NO: 83555 - protein, 212 aa, Zea mays
  Coding DNA Sequence Number=SeqID_41776
  Homolog annotation: Hit_ID=Q2R2F0; Match level="QueryCoverage=14%, HitCoverage=7%, E-value=1e-07, Identity=83%"; Hit description=AT hook motif family protein, expressed
  Pfam annotation: Domain name=Bromodomain; Domain location=2-85; Score= -17.5; E_value=0.085; Accession=PF00439.15; Description=Bromodomain
MAVEDADVAVTVQLDLGFMVFNRIPDYHGIIKHSMDFSTIRKKLDKGDIPTWSDLSLQMYLVRLVHLVGCYKISVGTDMGIFSQFTLSERILRPPFKNIYCKMLRMSDAYIVVVNTFTILICFTFGIMAKCFHVTNRGLLVIIHAVVNARLSKDSSMGDSLYMRTKKGWFPTGSVYRKAVGLGYKSVAHFLIAKHNNKQLPTDIVNNAEELQ

SEQ ID NO: 83556 - protein, 80 aa, Zea mays
  Coding DNA Sequence Number=SeqID_41777
MAVEDADVAVTVQLDLGFMVFNREEIEVTANVGVGVKIVQSSSSTDAGIDCDEQRRAAPGATAAAPAAVRASVPTGKERH

SEQ ID NO: 83557 - protein, 112 aa, Zea mays
  Coding DNA Sequence Number=SeqID_41778
MRPRRTVSRGRTGSRQVFLVVDERPQHECLLLMVFVQGFQLGIGCTRNENGLGMRMHNIGMDCARGEGNRKGTQHRNGLCARRRESERQNTEWAEQGMAERGMADYYCSLNK

SEQ ID NO: 83558 - protein, 76 aa, Zea mays
  Coding DNA Sequence Number=SeqID_41779
  Gene Ontology: Mol. function=protein phosphatase type 2C activity
  Subcellular localization annotation: CTP_CleavageSite=49; ConfidenceScore=5.46e-01
MTRRNLATASSTSRNSPTWPHVRRSRRLDTVQSGCSALSIVKQGDLMVVANVNDSRVVLGTAFYDDAITSSSSSST
